(19) United States
(12) Patent Application Publication
(10) Pub. No.: US 2021/0087568 A1
(43) Pub. Date: Mar. 25, 2021

(54) Modified Guide RNAs for Gene Editing

(71) Applicant: Intellia Therapeutics, Inc., Cambridge, MA (US)

(72) Inventors: Amy Madison Rhoden Smith, Durham, NC (US); Seth C. Alexander, Medford, MA (US); Duncan Brown, Berkeley, CA (US); Robert Brown, Cambridge, MA (US); Adhiraj Lanba, Medford, MA (US); Rebecca Lescarbeau, Medford, MA (US); Reynald Michael Lescarbeau, Medford, MA (US); Rubina Parmar, Acton, MA (US); Matthew Roy, Arlington, MA (US); Paige Salerno, Arlington, MA (US); Jessica Lynn Seitzer, Windham, NH (US)

(73) Assignee: Intellia Therapeutics, Inc., Cambridge, MA (US)

(21) Appl. No.: 17/111,769

(22) Filed: Dec. 4, 2020

Related U.S. Application Data
(63) Continuation of application No. PCT/US2019/036160, filed on Jun. 7, 2019.
(60) Provisional application No. 62/682,838, filed on Jun. 8, 2018.
(60) Provisional application No. 62/682,820, filed on Jun. 8, 2018.

(51) Int. Cl. C12N 15/113; C12N 9/22

(52) U.S. Cl. CPC C12N 15/113; C12N 9/22; C12N 2310/531; C12N 2310/20; C12N 2310/315; C12N 2310/3231; C12N 2310/321

(57) ABSTRACT

This disclosure relates to modified guide RNAs having improved in vitro and in vivo activity in gene editing methods.

[0001] This application is a Continuation of International Application No. PCT/US2019/036160, filed on Jun. 7, 2019, which claims the benefit of U.S. Provisional Patent Application No. 62/682,838, filed Jun. 8, 2018, and U.S. Provisional Patent Application No. 62/682,820, filed Jun. 8, 2018, each of which is incorporated herein by reference for all purposes.

[0002] The instant application contains a Sequence Listing which has been submitted electronically in ASCII format and is hereby incorporated by reference in its entirety. Said ASCII copy, created on Dec. 4, 2020, is named 2020-12-04_01155-0022-00US_ST25.txt and is 969,230 bytes in size.

[0003] This disclosure relates to the field of gene editing using CRISPR/Cas systems, a part of the prokaryotic immune system that recognizes and cuts exogenous genetic elements. The CRISPR/Cas system relies on a single nuclease, termed CRISPR-associated protein 9 (Cas9), which induces site-specific breaks in DNA. Cas9 is guided to specific DNA sequences by small RNA molecules termed guide RNA (gRNA). A complete guide RNA comprises tracrRNA (trRNA) and crisprRNA (crRNA). A crRNA comprising a guide region may also be referred to as a gRNA, with the understanding that to form a complete gRNA it should be or become associated covalently or noncovalently with a trRNA. The trRNA and crRNA may be contained within a single guide RNA (sgRNA) or in two separate RNA molecules of a dual guide RNA (dgRNA). Cas9 in combination with trRNA and crRNA or an sgRNA is termed the Cas9 ribonucleoprotein complex (RNP).

[0004] Oligonucleotides, and in particular RNA, are sometimes degraded in cells and in serum by non-enzymatic, endonuclease or exonuclease cleavage. Improved methods and compositions for preventing such degradation, improving stability of gRNAs and enhancing gene editing efficiency is desired, especially for therapeutic applications.

### SUMMARY

[0005] In some embodiments, genome editing tools are provided comprising modified guide RNA (gRNA). The modifications of gRNAs described herein may improve the stability of the gRNA and the gRNA/Cas9 complex and improve the activity of Cas9 (e.g., SaCas9, SpyCas9, and equivalents) to cleave target DNA.

[0006] In some embodiments, modified crisprRNA (crRNA) and/or modified tracrRNA (trRNA) are provided. In some embodiments, the modified crRNA and/or modified trRNA comprise a dual guide RNA (dgRNA). In some embodiments, the modified crRNA and/or modified trRNA comprise a single guide RNA (sgRNA). The modifications of crRNA and/or trRNA described herein may improve the stability of the gRNA and the gRNA/Cas9 complex and improve the activity of Cas9 (e.g., SauCas9, SpyCas9, and equivalents) to cleave target DNA. In some embodiments, the crRNA portion of a dgRNA or an sgRNA is modified in the targeting domain.

[0007] In some embodiments, genome editing tools are provided comprising short-single guide RNA (short-sgRNA). In some embodiments, the short-sgRNA is modified. The short-sgRNAs described herein may improve the stability of the short-sgRNA and the short-sgRNA/Cas9 complex and improve the activity of Cas9 (e.g., SauCas9, SpyCas9, and equivalents) to cleave target DNA.

[0008] In some embodiments, a gRNA (e.g., sgRNA, short-sgRNA, dgRNA, or crRNA) comprises a modification at one or more YA sites, e.g., as set forth in the embodiments below, Table 1, and in the Examples and associated Figures. For the avoidance of doubt, sgRNAs include but are not limited to short-sgRNAs. As discussed in the Examples section, it has been found that gRNAs can be susceptible to an RNase A-like degradation pattern, e.g., including cleavage at unmodified YA sites. It has further been found that YA site modifications can reduce or eliminate such cleavage and that many YA site modifications appear to be tolerated without adversely affecting the ability of the gRNA to direct cleavage by a nuclease such as Cas9. It has also been found that certain gRNA positions, including but not limited to YA sites, can be modified despite statements by others (see Yin et al., Nature Biotechnol. 35:1179-1187 (2017)) that they are contacted by Cas9 and should not be modified out of concern for loss of activity. Such modifications may further reduce undesirable gRNA degradation while not compromising activity.

[0009] The following embodiments are encompassed.
[0010] Embodiment 01 is a guide RNA (gRNA) which is a short-single guide RNA (short-sgRNA) comprising a conserved portion of an sgRNA comprising a hairpin region, wherein the hairpin region lacks at least 5-10 nucleotides and wherein the short-sgRNA comprises a 5′ end modification or a 3′ end modification.
[0011] Embodiment 02 is the gRNA of embodiment 1, wherein the short-sgRNA comprises a 5′ end modification.
[0012] Embodiment 03 is the gRNA of any one of the preceding embodiments, wherein the short-sgRNA comprises a 3′ end modification.
[0013] Embodiment 04 is the gRNA of any one of the preceding embodiments, wherein the short-sgRNA comprises a 5′ end modification and a 3′ end modification.
[0014] Embodiment 05 is the gRNA of any one of the preceding embodiments, wherein the short-sgRNA comprises a 3′ tail.
[0015] Embodiment 06 is the gRNA of embodiment 5, wherein the 3′ tail comprises 1, 2, 3, 4, 5, 6, 7, 8, 9, or 10 nucleotides.
[0016] Embodiment 07 is the gRNA of embodiment 5, wherein the 3′ tail comprises about 1-2, 1-3, 1-4, 1-5, 1-7, 1-10, at least 1-5, at least 1-3, at least 1-4, at least 1-5, at least 1-5, at least 1-7, or at least 1-10 nucleotides.
[0017] Embodiment 08 is the gRNA of any one of the preceding embodiments, wherein the short-sgRNA does not comprise a 3′ tail.
[0018] Embodiment 09 is the gRNA of any one of the preceding embodiments, comprising a modification in the hairpin region.
[0019] Embodiment 10 is the gRNA of any one of the preceding embodiments, comprising a 3′ end modification, and a modification in the hairpin region.
[0020] Embodiment 11 is the gRNA of any one of the preceding embodiments, comprising a 3′ end modification, a modification in the hairpin region, and a 5′ end modification.
[0021] Embodiment 12 is the gRNA of any one of the preceding embodiments, comprising a 5′ end modification, and a modification in the hairpin region.
[0022] Embodiment 13 is the gRNA of any one of the preceding embodiments, wherein the at least 5-10 lacking nucleotides are consecutive.
[0023] Embodiment 14 is the gRNA of any one of the preceding embodiments, wherein the at least 5-10 lacking nucleotides:
   [0024] i. are within hairpin 1;
   [0025] ii. are within hairpin 1 and the “N” between hairpin 1 and hairpin 2;
   [0026] iii. are within hairpin 1 and the two nucleotides immediately 3′ of hairpin 1;
   [0027] iv. include at least a portion of hairpin 1;
   [0028] v. are within hairpin 2;
   [0029] vi. include at least a portion of hairpin 2;
   [0030] vii. are within hairpin 1 and hairpin 2;
   [0031] viii. include at least a portion of hairpin 1 and include the “N” between hairpin 1 and hairpin 2;
   [0032] ix. include at least a portion of hairpin 2 and include the “N” between hairpin 1 and hairpin 2;
   [0033] x. include at least a portion of hairpin 1, include the “N” between hairpin 1 and hairpin 2, and include at least a portion of hairpin 2;
   [0034] xi. are within hairpin 1 or hairpin 2, optionally including the “N” between hairpin 1 and hairpin 2;
   [0035] xii. are consecutive;
   [0036] xiii. are consecutive and include the “N” between hairpin 1 and hairpin 2;
   [0037] xiv. are consecutive and span at least a portion of hairpin 1 and a portion of hairpin 2;
   [0038] xv. are consecutive and span at least a portion of hairpin 1 and the “N” between hairpin 1 and hairpin 2; or
   [0039] xvi. are consecutive and span at least a portion of hairpin 1 and two nucleotides immediately 3′ of hairpin 1.
[0040] Embodiment 15 is the gRNA of any one of the preceding embodiments, further comprising a guide region.
[0041] Embodiment 16 is the gRNA of any one of the preceding embodiments, wherein the 3′ and/or 5′ end modification comprises a protective end modification, such as a modified nucleotide selected from 2′-O-methyl (2′-OMe) modified nucleotide, 2′-O-(2-methoxyethyl) (2′-O-moe) modified nucleotide, a 2′-fluoro (2′-F) modified nucleotide, a phosphorothioate (PS) linkage between nucleotides, an inverted abasic modified nucleotide, or combinations thereof.
[0042] Embodiment 17 is the gRNA of any one of the preceding embodiments, wherein the modification in the hairpin region comprises a modified nucleotide selected from 2′-O-methyl (2′-OMe) modified nucleotide, a 2′-fluoro (2′-F) modified nucleotide, a phosphorothioate (PS) linkage between nucleotides, or combinations thereof.
[0043] Embodiment 18 is the gRNA of any one of the preceding embodiments, wherein the 3′ and/or 5′ end modification comprises or further comprises a 2′-O-methyl (2′-OMe) modified nucleotide.
[0044] Embodiment 19 is the gRNA of any one of the preceding embodiments, wherein the 3′ and/or 5′ end modification comprises or further comprises a 2′-fluoro (2′-F) modified nucleotide.
[0045] Embodiment 20 is the gRNA of any one of the preceding embodiments, wherein the 3′ and/or 5′ end modification comprises or further comprises a phosphorothioate (PS) linkage between nucleotides.
[0046] Embodiment 21 is the gRNA of any one of the preceding embodiments, wherein the 3′ and/or 5′ end modification comprises or further comprises an inverted abasic modified nucleotide.
[0047] Embodiment 22 is the gRNA of any one of the preceding embodiments, wherein the modification in the hairpin region comprises or further comprises a 2′-O-methyl (2′-OMe) modified nucleotide.
[0048] Embodiment 23 is the gRNA of any one of the preceding embodiments, wherein the modification in the hairpin region comprises or further comprises a 2′-fluoro (2′-F) modified nucleotide.
[0049] Embodiment 24 is the gRNA of any one of the preceding embodiments, wherein the 3′ end modification comprises any of:
   [0050] i. a modification of any one or more of the last 7, 6, 5, 4, 3, 2, or 1 nucleotides;
   [0051] ii. one modified nucleotide;
   [0052] iii. two modified nucleotides;
   [0053] iv. three modified nucleotides;
   [0054] v. four modified nucleotides;
   [0055] vi. five modified nucleotides;
   [0056] vii. six modified nucleotides; and
   [0057] viii. seven modified nucleotides.
[0058] Embodiment 25 is the gRNA of any one of the preceding embodiments, wherein the at least 5-10 nucleotides comprise nucleotides 54-61 of SEQ ID NO:400, nucleotides 53-60 of SEQ ID NO:400; or nucleotides 54-58 of SEQ ID NO:400, optionally wherein the short-sgRNA comprises modifications at least H1-1 to H1-5 and H2-1 to H2-12.
[0059] Embodiment 26 is the gRNA of any one of the preceding embodiments, wherein the at least 5-10 nucleotides:
   [0060] i. consist of 5-10 nucleotides;
   [0061] ii. consist of 6-10 nucleotides;
   [0062] iii. consist of 5 nucleotides;
   [0063] iv. consist of 6 nucleotides;
   [0064] v. consist of 7 nucleotides;
   [0065] vi. consist of 8 nucleotides;
   [0066] vii. consist of 9 nucleotides;
   [0067] viii. consist of 10 nucleotides;
   [0068] ix. consist of 5-10 consecutive nucleotides;
   [0069] x. consist of 6-10 consecutive nucleotides;
   [0070] xi. consist of 5 consecutive nucleotides;
   [0071] xii. consist of 6 consecutive nucleotides;
   [0072] xiii. consist of 7 consecutive nucleotides;
   [0073] xiv. consist of 8 consecutive nucleotides;
   [0074] xv. consist of 9 consecutive nucleotides; or
   [0075] xvi. consist of 10 consecutive nucleotides.
[0076] Embodiment 27 is the gRNA of any one of the preceding embodiments, wherein the 3′ end modification comprises one or more of:
   [0077] i. a phosphorothioate (PS) linkage between nucleotides;
   [0078] ii. a 2′-OMe modified nucleotide;
   [0079] iii. a 2′-O-moe modified nucleotide;
   [0080] iv. a 2′-F modified nucleotide;
   [0081] v. an inverted abasic modified nucleotide; and
   [0082] vi. a combination of one or more of (i.)-(v.).
[0083] Embodiment 28 is the gRNA of any one of the preceding embodiments, wherein the short-sgRNA comprises a 3′ tail comprising one or more of:
   [0084] i. a phosphorothioate (PS) linkage between nucleotides;
   [0085] ii. a 2′-OMe modified nucleotide;
   [0086] iii. a 2′-O-moe modified nucleotide;
   [0087] iv. a 2′-F modified nucleotide;
   [0088] v. an inverted abasic modified nucleotide; and
   [0089] vi. a combination of one or more of (i.)-(v.).
[0090] Embodiment 29 is the gRNA any one of the preceding embodiments, wherein the short-sgRNA comprises one or more of:
   [0091] i. 1, 2, 3, 4, 5, 6, 7, 8, 9, or 10 PS linkages between nucleotides;
   [0092] ii. 1, 2, 3, 4, 5, 6, 7, 8, 9, 10, 12, 14, 16, or 18 PS linkages between nucleotides;
   [0093] iii. about 1-3, 1-5, 1-6, 1-7, 1-8, 1-9, or 1-10 PS linkages between nucleotides;
   [0094] iv. about 1-3, 1-5, 1-6, 1-7, 1-8, 1-9, 1-10, 1-12, 1-14, 1-16, 1-18, or 1-20 PS linkages between nucleotides; and
   [0095] v. PS linkages between each nucleotide.
[0096] Embodiment 30 is the gRNA of any one of the preceding embodiments, wherein the 3′ end modification comprises at least one PS linkage, and wherein one or more of:
   [0097] i. there is one PS linkage, and the linkage is between the last and second to last nucleotide;
   [0098] ii. there are two PS linkages between the last three nucleotides;
   [0099] iii. there are PS linkages between any one or more of the last four nucleotides;
   [0100] iv. there are PS linkages between any one or more of the last five nucleotides; and
   [0101] v. there are PS linkages between any one or more of the last 2, 3, 4, 5, 6, 7, 8, 9, or 10 nucleotides.
[0102] Embodiment 31 is the gRNA of embodiment 31, wherein the 3′ end modification further comprises at least one 2′-OMe, 2′-O-moe, inverted abasic, or 2′-F modified nucleotide.
[0103] Embodiment 32 is the gRNA of any one of the preceding embodiments, wherein the 3′ end modification comprises:
   [0104] i. a modification of one or more of the last 1-7 nucleotides, wherein the modification is a PS linkage, inverted abasic nucleotide, 2′-OMe, 2′-O-moe, 2′-F, or combinations thereof;
   [0105] ii. a modification to the last nucleotide with 2′-OMe, 2′-O-moe, 2′-F, or combinations thereof, and an optional one or two PS linkages to the next nucleotide and/or the first nucleotide of the 3′ tail;
   [0106] iii. a modification to the last and/or second to last nucleotide with 2′-OMe, 2′-O-moe, 2′-F, or combinations thereof, and optionally one or more PS linkages;
   [0107] iv. a modification to the last, second to last, and/or third to last nucleotides with 2′-OMe, 2′-O-moe, 2′-F, or combinations thereof, and optionally one or more PS linkages;
   [0108] v. a modification to the last, second to last, third to last, and/or fourth to last nucleotides with 2′-OMe, 2′-O-moe, 2′-F, or combinations thereof, and optionally one or more PS linkages; or
   [0109] vi. a modification to the last, second to last, third to last, fourth to last, and/or fifth to last nucleotides with 2′-OMe, 2′-O-moe, 2′-F, or combinations thereof, and optionally one or more PS linkages.
[0110] Embodiment 33 is the gRNA of any one of the preceding embodiments, wherein the sgRNA comprise a 3′ tail, wherein the 3′ tail comprises a modification of any one or more of the nucleotides present in the 3′ tail.
[0111] Embodiment 34 is the gRNA of embodiment 33, wherein the 3′ tail is fully modified.
[0112] Embodiment 35 is the gRNA of embodiment 33, wherein the at least 5-10 nucleotides comprise nucleotides 54-61 of SEQ ID NO:400, nucleotides 53-60 of SEQ ID NO:400; or nucleotides 54-58 of SEQ ID NO:400, optionally wherein the short-sgRNA comprises modifications at least H1-1 to H1-5 and H2-1 to H2-12.
[0113] Embodiment 36 is the gRNA of any one of the preceding embodiments, wherein the short-sgRNA comprises any one or more of:
   [0114] i. the 3′ end modification as shown in any one of SEQ ID Nos: 1-54;
   [0115] ii. (i) a 2′-OMe modified nucleotide at the last nucleotide of the conserved region of an sgRNA or short-sgRNA, (ii) three consecutive 2′O-moe modified nucleotides immediately 5′ to the 2′-OMe modified nucleotide, and (iii) three consecutive PS linkages between the last three nucleotides;
   [0116] iii. (i) five consecutive 2′-OMe modified nucleotides from the 3′ end of the 3′ terminus, and (ii) three PS linkages between the last three nucleotides;
   [0117] iv. an inverted abasic modified nucleotide at the last nucleotide of the conserved region of an sgRNA or short-sgRNA;
   [0118] v. (i) an inverted abasic modified nucleotide at the last nucleotide of the conserved region of an sgRNA or short-sgRNA, and (ii) three consecutive 2′-OMe modified nucleotides at the last three nucleotides of the conserved region of an sgRNA or short-sgRNA;
   [0119] vi. (i) 15 consecutive 2′-OMe modified nucleotides from the 3′ end of the 3′ terminus, (ii) five consecutive 2′-F modified nucleotides immediately 5′ to the 2′-OMe modified nucleotides, and (iii) three PS linkages between the last three nucleotides;
   [0120] vii. (i) alternating 2′-OMe modified nucleotides and 2′-F modified nucleotides at the last 20 nucleotides of the conserved region of an sgRNA or short-sgRNA, and (ii) three PS linkages between the last three nucleotides;
   [0121] viii. (i) two or three consecutive 2′-OMe modified nucleotides, and (ii) three PS linkages between the last three nucleotides;
   [0122] ix. one PS linkage between the last and next to last nucleotides; and
   [0123] x. 15 or 20 consecutive 2′-OMe modified nucleotides, and (ii) three PS linkages between the last three nucleotides.
[0124] Embodiment 37 is the gRNA of any one of the preceding embodiments, wherein the 5′ end modification comprises any one or more of:
   [0125] i. a modification of any one or more of nucleotides 1-7 of the guide region;
   [0126] ii. one modified nucleotide;
   [0127] iii. two modified nucleotides;
   [0128] iv. three modified nucleotides;
   [0129] v. four modified nucleotides;
   [0130] vi. five modified nucleotides;
   [0131] vii. six modified nucleotides; and
   [0132] viii. seven modified nucleotides.
[0133] Embodiment 38 is the gRNA of any one of the preceding embodiments, wherein the 5′ end modification comprises a modification of between 1 and 7, between 1 and 5, between 1 and 4, between 1 and 3, or between 1 and 2 nucleotides.
[0134] Embodiment 39 is the gRNA of any one of the preceding embodiments, wherein the at least 5-10 nucleotides:
   [0135] i. comprise nucleotides 54-61 of SEQ ID NO:400;
   [0136] ii. comprise nucleotides 53-60 of SEQ ID NO:400;
   [0137] iii. comprise nucleotides 54-58 of SEQ ID NO:400.
   [0138] iv. consist of nucleotides 54-61 of SEQ ID NO:400;
   [0139] v. consist of nucleotides 53-60 of SEQ ID NO:400; or
   [0140] vi. consist of nucleotides 54-58 of SEQ ID NO:400.
[0141] Embodiment 40 is the gRNA of any one of the preceding embodiments, wherein the 5′ end modification comprises one or more of:
   [0142] i. a phosphorothioate (PS) linkage between nucleotides;
   [0143] ii. a 2′-OMe modified nucleotide;
   [0144] iii. a 2′-O-moe modified nucleotide;
   [0145] iv. a 2′-F modified nucleotide;
   [0146] v. an inverted abasic modified nucleotide;
   [0147] vi. a deoxyribonucleotide;
   [0148] vii. an inosine; and
   [0149] viii. combinations of one or more of (i.)-(vii.).
[0150] Embodiment 41 is the gRNA any one of the preceding embodiments, wherein the 5′ end modification comprises:
   [0151] i. 1, 2, 3, 4, 5, 6, and/or 7 PS linkages between nucleotides; or
   [0152] ii. about 1-2, 1-3, 1-4, 1-5, 1-6, or 1-7 PS linkages between nucleotides.
[0153] Embodiment 42 is the gRNA of any one of the preceding embodiments, wherein the 5′ end modification comprises at least one PS linkage, and wherein:
   [0154] i. there is one PS linkage, and the linkage is between nucleotides 1 and 2 of the guide region;
   [0155] ii. there are two PS linkages, and the linkages are between nucleotides 1 and 2, and 2 and 3 of the guide region;
   [0156] iii. there are PS linkages between any one or more of nucleotides 1 and 2, 2 and 3, and 3 and 4 of the guide region;
   [0157] iv. there are PS linkages between any one or more of nucleotides 1 and 2, 2 and 3, 3 and 4, and 4 and 5 of the guide region;
   [0158] v. there are PS linkages between any one or more of nucleotides 1 and 2, 2 and 3, 3 and 4, 4 and 5, and 5 and 6 of the guide region;
   [0159] vi. there are PS linkages between any one or more of nucleotides 1 and 2, 2 and 3, 3 and 4, 4 and 5, 5 and 6, and 6 and 7 of the guide region; or
   [0160] vii. there are PS linkages between any one or more of nucleotides 1 and 2, 2 and 3, 3 and 4, 4 and 5, 5 and 6, 6 and 7, and 7 and 8 of the guide region.
[0161] Embodiment 43 is the gRNA of embodiment 42, wherein the 5′ end modification further comprises at least one 2′-OMe, 2′-O-moe, inverted abasic, or 2′-F modified nucleotide.
[0162] Embodiment 44 is the gRNA of any one of the preceding embodiments, wherein the short-sgRNA comprises:
   [0163] i. a modification of one or more of nucleotides 1-7 of the variable region, wherein the modification is a PS linkage, inverted abasic nucleotide, 2′-OMe, 2′-O-moe, 2′-F, 2′-H (a deoxyribonucleotide), an inosine, and/or combinations thereof;
   [0164] ii. a modification to the first nucleotide of the guide region with 2′-OMe, 2′-O-moe, 2′-F, 2′-H, an inosine, or combinations thereof, and an optional PS linkage to the next nucleotide;
   [0165] iii. a modification to the first and/or second nucleotide of the variable region with 2′-OMe, 2′-O-moe, 2′-F, 2′-H, an inosine, or combinations thereof, and optionally one or more PS linkages;
   [0166] iv. a modification to the first, second, and/or third nucleotides of the variable region with 2′-OMe, 2′-O-moe, 2′-F, 2′-H, an inosine, or combinations thereof, and optionally one or more PS linkages;
   [0167] v. a modification to the first, second, third, and/or fourth nucleotides of the variable region with 2′-OMe, 2′-O-moe, 2′-F, 2′-H, an inosine, or combinations thereof, and optionally one or more PS linkages; or
   [0168] vi. a modification to the first, second, third, fourth, and/or fifth nucleotides of the variable region with 2′-OMe, 2′-O-moe, 2′-F, 2′-H, an inosine, or combinations thereof, and optionally one or more PS linkages.
[0169] Embodiment 45 is the gRNA of any one of the preceding embodiments, wherein the short-sgRNA comprises any one or more of:
   [0170] i. a 5′ end modification as shown in any one of SEQ ID Nos: 1-54;
   [0171] ii. 2′-OMe modified nucleotides at nucleotides 1, 2, and 3 of the guide region;
   [0172] iii. 2′-OMe modified nucleotides at nucleotides 1, 2, and 3 of the guide region and PS linkages between nucleotides 1 and 2, 2 and 3, and 3 and 4 of the guide region;
   [0173] iv. 2′-OMe modified nucleotides at nucleotides 1, 2, 3, 4, and 5 of the guide region;
   [0174] v. 2′-OMe modified nucleotides at nucleotides 1, 2, 3, 4, and 5 of the guide region and PS linkages between nucleotides 1 and 2, 2 and 3, 3 and 4, 4 and 5, and 5 and 6 of the guide region;
   [0175] vi. 2′O-moe modified nucleotides at nucleotides 1, 2, and 3 of the guide region;
   [0176] vii. 2′O-moe modified nucleotides at nucleotides 1, 2, and 3 of the guide region and PS linkages between nucleotides 1 and 2, 2 and 3, and 3 and 4 of the guide region;
   [0177] viii. an inverted abasic modified nucleotide at nucleotide 1 of the guide region;
   [0178] ix. an inverted abasic modified nucleotide at nucleotide 1 of the guide region and 2′-OMe modified nucleotides at nucleotides 1, 2, and 3 of the guide region; and
   [0179] x. an inverted abasic modified nucleotide at nucleotide 1 of the guide region, 2′-OMe modified nucleotides at nucleotides 1, 2, and 3 of the guide region, and PS linkages between nucleotides 1 and 2, 2 and 3, 3 and 4, 4 and 5, and 5 and 6 of the variable region.
[0180] Embodiment 46 is the gRNA of any one of the preceding embodiments, wherein the upper stem region comprises at least one modification.
[0181] Embodiment 47 is the gRNA of any one of the preceding embodiments, wherein the upper stem modification comprises any one or more of:
   [0182] i. a modification to any one or more of US1-US12 in the upper stem region;
   [0183] ii. a modification of at least 1, 2, 3, 4, 5, 6, 7, 8, 9, 10, 11, or all 12 nucleotides in the upper stem region; and
   [0184] iii. a modification of about 1-2, 1-3, 1-4, 1-5, 1-6, 1-7, 1-8, 1-9, 1-10, or 1-12 nucleotides in the upper stem region.
[0185] Embodiment 48 is the gRNA of embodiment 47, wherein the upper stem modification comprises one or more of:
   [0186] i. a 2′-OMe modified nucleotide;
   [0187] ii. a 2′-O-moe modified nucleotide;
   [0188] iii. a 2′-F modified nucleotide; and
   [0189] iv. combinations of one or more of (i.)-(iii.).
[0190] Embodiment 49 is a guide RNA which is a short-sgRNA comprising a conserved portion of an sgRNA comprising a hairpin region, wherein the hairpin region lacks at least 5-10 nucleotides and wherein the short-sgRNA comprises a 5′ end modification and one or more modification in one or more of:
   [0191] i. the upper stem region;
   [0192] ii. the hairpin 1 region; and
   [0193] iii. the hairpin 2 region,
      wherein the 5′ end modification comprises a 5′ protective end modification, such as at least two phosphorothioate (PS) linkages within the first seven nucleotides.
[0194] Embodiment 50 is the gRNA of embodiment 49, wherein at least one modification comprises a 2′-O-methyl (2′-OMe) modified nucleotide.
[0195] Embodiment 51 is the gRNA of embodiment 49 or embodiment 50, wherein at least one modification comprises a 2′-fluoro (2′-F) modified nucleotide.
[0196] Embodiment 52 is the gRNA of any one of embodiments 49-51, wherein at least one modification comprises a phosphorothioate (PS) bond between nucleotides.
[0197] Embodiment 53 is the gRNA of any one of embodiments 49-52, wherein the short-sgRNA comprises one or more modifications in the upper stem region.
[0198] Embodiment 54 is the gRNA of embodiment 53, comprising modifications at any one of US1 to US12.
[0199] Embodiment 55 is the gRNA of any one of embodiments 49-54, wherein the short-sgRNA comprises one or more modifications in the hairpin 1 region.
[0200] Embodiment 56 is the gRNA of embodiment 55, wherein the short-sgRNA comprises a modification at H1-1.
[0201] Embodiment 57 is the gRNA of any one of embodiments 49-56, wherein the short-sgRNA comprises one or more modifications in the hairpin 2 region.
[0202] Embodiment 58 is the gRNA of embodiment 57, wherein the short-sgRNA comprises a modification at H2-1.
[0203] Embodiment 59 is the gRNA of any one of embodiments 49-58, wherein the short-sgRNA comprises modifications at H1-1 to H1-12.
[0204] Embodiment 60 is the gRNA of any one of embodiments 49-59, wherein the short-sgRNA comprises modifications at H2-1 to H2-15.
[0205] Embodiment 61 is the gRNA of any one of embodiments 49-60, wherein the short-sgRNA comprises one or more modifications in each of the upper stem region, the hairpin 1 region, and the hairpin 2 region.
[0206] Embodiment 62 is the gRNA of any one of embodiments 49-61, wherein the short-sgRNA comprises a modified nucleotide between hairpin 1 and hairpin 2 regions.
[0207] Embodiment 63 is the gRNA of any one of embodiments 49-62, further comprising a lower stem region comprising a modification.
[0208] Embodiment 64 is the gRNA of any one of embodiments 49-63, further comprising a 3′ end modification.
[0209] Embodiment 65 is the gRNA of embodiment 64, wherein at least two of the last four nucleotides at the 3′ end of the 3′ terminus are modified.
[0210] Embodiment 66 is the gRNA of embodiment 64, wherein at least two of the last four nucleotides at the 3′ end of the 3′ terminus are modified with 2′-OMe, 2′-F, or 2′-O-moe.
[0211] Embodiment 67 is the gRNA of any one of embodiments 64-66, further comprising phosphorothioate (PS) bonds between one or more of the last four nucleotides at the 3′ end of the 3′ terminus.
[0212] Embodiment 68 is the gRNA of any one of embodiments 49-67, further comprising a bulge region comprising a modification.
[0213] Embodiment 69 is the gRNA of any one of embodiments 49-68, further comprising a nexus region comprising a modification.
[0214] Embodiment 70 is the gRNA of any one of embodiments 49-69, wherein at least the first three nucleotides at the 5′ end of the variable region, and the last three nucleotides at the 3′ end of the 3′ terminus are modified.
[0215] Embodiment 71 is the gRNA of any one of embodiments 49-70, wherein the first four nucleotides at the 5′ end of the variable region, and the last four nucleotides at the 3′ end of the 3′ terminus are linked with phosphorothioate (PS) bonds.
[0216] Embodiment 72 is the gRNA of any one of embodiments 70-71, wherein the end modifications comprise 2′-OMe.
[0217] Embodiment 73 is the gRNA of any one of embodiments 70-71, wherein the end modifications comprise 2′-F.
[0218] Embodiment 74 is the gRNA of any one of embodiments 49-73, wherein the first four nucleotides at the 5′ end of the variable region and the last four nucleotides at the 3′ end of the 3′ terminus are linked with a PS bond, and wherein the first three nucleotides at the 5′ end of the variable region and the last three nucleotides at the 3′ end of the 3′ terminus comprise 2′-OMe modifications.
[0219] Embodiment 75 is the gRNA of any one of embodiments 49-74, wherein the first four nucleotides at the 5′ terminus and the last four nucleotides at the 3′ terminus are linked with a PS bond, and wherein the first three nucleotides at the 5′ terminus and the last three nucleotides at the 3′ terminus comprise 2′-OMe, 2′-F, and/or 2′-O-moe modifications.
[0220] Embodiment 76 is the gRNA of any one of embodiments 49-75, wherein LS1, LS6, LS7, LS8, LS11, and/or LS12 are modified with 2′-OMe.
[0221] Embodiment 77 is the gRNA of any one of embodiments 49-76, wherein each of the nucleotides in the bulge region are modified with 2′-OMe.
[0222] Embodiment 78 is the gRNA of any one of embodiments 49-77, wherein at least 50% of the nucleotides in the bulge region are modified with 2′-OMe.
[0223] Embodiment 79 is the gRNA of any one of embodiments 49-78, wherein each of the nucleotides in the upper stem region are modified with 2′-OMe.
[0224] Embodiment 80 is the gRNA of any one of embodiments 49-79, wherein N16, N17, and/or N18 in the nexus region are modified with 2′-OMe.
[0225] Embodiment 81 is the gRNA of any one of embodiments 49-80, wherein N15, N16, N17, and/or N18 in the nexus region are modified.
[0226] Embodiment 82 is the gRNA of embodiment 80 or 81, wherein the modifications in the nexus region are selected from 2′-OMe and 2′F.
[0227] Embodiment 83 is the gRNA of any one of embodiments 80-82, wherein N16, N17, and N18 are linked with PS bonds.
[0228] Embodiment 84 is the gRNA of any one of embodiments 49-83, wherein each of the nucleotides remaining in the hairpin 1 region are modified with 2′-OMe.
[0229] Embodiment 85 is the gRNA of any one of embodiments 49-84, wherein each of the nucleotides in the hairpin 2 region are modified with 2′-OMe.
[0230] Embodiment 86 is a guide RNA which is a short-sgRNA comprising a conserved portion of an sgRNA comprising a hairpin region, wherein the hairpin region lacks at least 5-10 nucleotides and wherein the short-sgRNA comprises a 5′ end modification and a 3′ end modification, wherein the short-sgRNA further comprises any one or more of:
   [0231] i. at least one modification in the upper stem region; and
   [0232] ii. a 3′ tail.
[0233] Embodiment 87 is the gRNA of embodiment 86, wherein the upper stem modification comprises any one or more of:
   [0234] i. a modification of each nucleotide (US1-US12) in the upper stem region;
   [0235] ii. a modification to any one or more of US1-US12 in the upper stem region;
   [0236] iii. a modification of at least 1, 2, 3, 4, 5, 6, 7, 8, 9, 10, 11, or all 12 nucleotides in the upper stem region; and
   [0237] iv. a modification of about 1-2, 1-3, 1-4, 1-5, 1-6, 1-7, 1-8, 1-9, 1-10, or 1-12 nucleotides in the upper stem region.
[0238] Embodiment 88 is the gRNA of any one of embodiments 86-87, wherein the 5′ end modification comprises any one or more of:
   [0239] i. a modification of any one or more of nucleotides 1-7 of the variable region;
   [0240] ii. one modified nucleotide;
   [0241] iii. two modified nucleotides;
   [0242] iv. three modified nucleotides;
   [0243] v. four modified nucleotides;
   [0244] vi. five modified nucleotides;
   [0245] vii. six modified nucleotides; and
   [0246] viii. seven modified nucleotides.
[0247] Embodiment 89 is the gRNA of any one of embodiments 86-88, wherein the 5′ end modification comprises any one or more of:
   [0248] i. a 5′ end modification as shown in any one of SEQ ID Nos: 1-54, 401-532, 1001, 1007-1132, 1205-1212, 1322-1406, 1417-1501, 1511-1596, 3018-3059, 3063-3104, 3108-3149, 3153-3194, 3198-3239, 3243-3284, 3295-3341, 3343-3385, 3388-3430, or 3549-3552;
   [0249] ii. 2′-OMe modified nucleotides at nucleotides 1, 2, and 3 of the variable region;
   [0250] iii. 2′-OMe modified nucleotides at nucleotides 1, 2, and 3 of the variable region and PS linkages between nucleotides 1 and 2, 2 and 3, and 3 and 4 of the variable region;
   [0251] iv. 2′-OMe modified nucleotides at nucleotides 1, 2, 3, 4, and 5 of the variable region;
   [0252] v. 2′-OMe modified nucleotides at nucleotides 1, 2, 3, 4, and 5 of the variable region and PS linkages between nucleotides 1 and 2, 2 and 3, 3 and 4, 4 and 5, and 5 and 6 of the variable region;
   [0253] vi. 2′O-moe modified nucleotides at nucleotides 1, 2, and 3 of the variable region;
   [0254] vii. 2′O-moe modified nucleotides at nucleotides 1, 2, and 3 of the variable region and PS linkages between nucleotides 1 and 2, 2 and 3, and 3 and 4 of the variable region;
   [0255] viii. an inverted abasic modified nucleotide at nucleotide 1 of the variable region;
   [0256] ix. an inverted abasic modified nucleotide at nucleotide 1 of the variable region and 2′-OMe modified nucleotides at nucleotides 1, 2, and 3 of the variable region; and
   [0257] x. an inverted abasic modified nucleotide at nucleotide 1 of the variable region, 2′-OMe modified nucleotides at nucleotides 1, 2, and 3 of the variable region, and PS linkages between nucleotides 1 and 2, 2 and 3, 3 and 4, 4 and 5, and 5 and 6 of the variable region.
[0258] Embodiment 90 is the gRNA of embodiment 89, comprising 2′-OMe modified nucleotides at at least nucleotides 1, 2, and 3, of the variable region and PS linkages between nucleotides 1 and 2, 2 and 3, and 3 and 4 of the variable region.
[0259] Embodiment 91 is the gRNA of embodiment 89, comprising 2′-OMe modified nucleotides at at least nucleotides 1, 2, 3, and 4 of the variable region and PS linkages between nucleotides 1 and 2, 2 and 3, and 3 and 4 of the variable region.
[0260] Embodiment 92 is the gRNA of any one of embodiments 86-91, comprising a 3′ end modification comprising any one or more of:
   [0261] i. a modification of any one or more of the last 7, 6, 5, 4, 3, 2, or 1 nucleotides;
   [0262] ii. one modified nucleotide;
   [0263] iii. two modified nucleotides;
   [0264] iv. three modified nucleotides;
   [0265] v. four modified nucleotides;
   [0266] vi. five modified nucleotides;
   [0267] vii. six modified nucleotides; and
   [0268] viii. seven modified nucleotides.
[0269] Embodiment 93 is the gRNA of any one of embodiments 86-92, wherein the short-sgRNA comprises any one or more of:
   [0270] i. a 3′ end modification shown in any one of SEQ ID Nos: 1-54, 401-532, 1001, 1007-1132, 1205-1212, 1322-1406, 1417-1501, 1511-1596, 3018-3059, 3063-3104, 3108-3149, 3153-3194, 3198-3239, 3243-3284, 3295-3341, 3343-3385, 3388-3430, or 3549-3552;
   [0271] ii. (i) a 2′-OMe modified nucleotide at the last nucleotide of the conserved region of an sgRNA or short-sgRNA, (ii) three consecutive 2′O-moe modified nucleotides immediately 5′ to the 2′-OMe modified nucleotide, and (iii) three consecutive PS linkages between the last three nucleotides;
   [0272] iii. (i) five consecutive 2′-OMe modified nucleotides, and (ii) three PS linkages between the last three nucleotides;
   [0273] iv. an inverted abasic modified nucleotide at the last nucleotide of the conserved region of an sgRNA or short-sgRNA;
   [0274] v. (i) an inverted abasic modified nucleotide at the last nucleotide of the conserved region of an sgRNA or short-sgRNA, and (ii) three consecutive 2′-OMe modified nucleotides at the last three nucleotides of the conserved region of an sgRNA or short-sgRNA;
   [0275] vi. (i) 15 consecutive 2′-OMe modified nucleotides, (ii) five consecutive 2′-F modified nucleotides immediately 5′ to the 2′-OMe modified nucleotides, and (iii) three PS linkages between the last three nucleotides;
   [0276] vii. (i) alternating 2′-OMe modified nucleotides and 2′-F modified nucleotides at the last 20 nucleotides of the conserved region of an sgRNA or short-sgRNA, and (ii) three PS linkages between the last three nucleotides;
   [0277] viii. (i) two or three consecutive 2′-OMe modified nucleotides, and (ii) three PS linkages between the last three nucleotides;
   [0278] ix. one PS linkage between the last and next to last nucleotides; and
   [0279] x. 15 or 20 consecutive 2′-OMe modified nucleotides, and (ii) three PS linkages between the last three nucleotides.
[0280] Embodiment 94 is the gRNA of any one of embodiments 86-93, wherein the sgRNA comprise a 3′ tail, wherein the 3′ tail comprises a modification of any one or more of the nucleotides present in the 3′ tail.
[0281] Embodiment 95 is the gRNA of embodiment 94, wherein the 3′ tail is fully modified.
[0282] Embodiment 96 is the gRNA of embodiment 94 wherein the 3′ tail comprises 1, 2, 3, 4, 5, 6, 7, 8, 9, 10, 1-2, 1-3, 1-4, 1-5, 1-6, 1-7, 1-8, 1-9, or 1-10 nucleotides, optionally where any one or more of these nucleotides are modified.
[0283] Embodiment 97 is a guide RNA which is a short-sgRNA comprising any of SEQ ID Nos: 1-54, 201-254, and 301-354, including the modifications of Table 1.
[0284] Embodiment 98 is a guide RNA which is a short-sgRNA comprising nucleic acids having at least 99, 98, 97, 96, 95, 94, 93, 92, 91, 90, 85, 80, 75, or 70% identity to the nucleic acids of any one of SEQ ID Nos: 1-54, 201-254, and 301-354, wherein the modification at each nucleotide of the short-sgRNA that corresponds to a nucleotide of the reference sequence identifier in Table 1, is identical to or equivalent to the modification shown in the reference sequence identifier in Table 1.
[0285] Embodiment 99 is the gRNA of any one of the preceding embodiments, comprising a YA modification at at least one guide region YA site.
[0286] Embodiment 100 is the gRNA of any one of the preceding embodiments, comprising a YA modification at at least one guide region YA site that is not a 5′ end modification.
[0287] Embodiment 101 is the gRNA of any one of the preceding embodiments, comprising a YA modification at one or more guide region YA sites, wherein the guide region YA site is at or after nucleotide 8 from the 5′ end of the 5′ terminus.
[0288] Embodiment 102 is the gRNA of any one of the preceding embodiments comprising a YA modification at one or more guide region YA sites, wherein the short-sgRNA comprises one or more of:
   [0289] a. a modification at one or more of H1-1 and H2-1;
   [0290] b. a YA modification at 1, 2, 3, 4, or 5 guide region YA sites;
   [0291] c. a YA modification at 1, 2, 3, 4, or 5 guide region YA sites, wherein the modification of at least one guide region YA site is different from any 5′ end modification of the sgRNA;
   [0292] d. a YA modification at one or more guide region YA sites, wherein the guide region YA site is at or after nucleotide 8 from the 5′ end of the 5′ terminus;
   [0293] e. a YA modification at one or more guide region YA sites, wherein the guide region YA site is within nucleotides 5-end, 6-end, 7-end, 8-end, 9-end, or 10-end from the 5′ end of the 5′ terminus;
   [0294] f. a YA modification at one or more guide region YA sites, wherein the guide region YA site is within 17, 16, 15, 14, 13, 12, 11, 10, or 9 nucleotides of the 3′ terminal nucleotide of the guide region;
   [0295] g. a YA modification at a guide region YA site other than a 5′ end modification;
   [0296] h. a YA modification at two or more guide region YA sites, wherein the guide region YA sites are at or after nucleotide 8 from the 5′ end of the 5′ terminus;
   [0297] i. a YA modification at two or more guide region YA sites, wherein the two guide region YA sites are within nucleotides 5-end, 6-end, 7-end, 8-end, 9-end, or 10-end from the 5′ end of the 5′ terminus;
   [0298] j. a YA modification at two or more guide region YA sites, wherein the guide region YA sites are within 17, 16, 15, 14, 13, 12, 11, 10, or 9 nucleotides of the 3′ terminal nucleotide of the guide region;
   [0299] k. a YA modification at two or more guide region YA sites other than a 5′ end modification; and
   [0300] l. a YA modification at two or more guide region YA sites, wherein the modifications of the guide region YA sites comprise a modification that at least one nucleotide located 5′ of the guide region YA site does not comprise.
[0301] Embodiment 103 is the gRNA of any one of the preceding embodiments, comprising a YA modification wherein the modification comprises 2′-fluoro, 2′-H, 2′-OMe, ENA, UNA, inosine, or PS.
[0302] Embodiment 104 is the gRNA of any one of the preceding embodiments, comprising a YA modification wherein the modification alters the structure of the dinucleotide motif to reduce RNA endonuclease activity.
[0303] Embodiment 105 is the gRNA of any one of the preceding embodiments, comprising a YA modification wherein the modification interferes with recognition or cleavage of a YA site by an RNase and/or stabilizes an RNA structure.
[0304] Embodiment 106 is the gRNA of any one of the preceding embodiments, comprising a YA modification wherein the modification comprises one or more of:
   [0305] a. a ribose modification selected from 2′-O-alkyl, 2′-F, 2′-moe, 2′-F arabinose, and 2′-H (deoxyribose);
   [0306] b. a bicyclic ribose analog, such as LNA, BNA, and ENA;
   [0307] c. an unlocked nucleic acid modification;
   [0308] d. a base modification, such as inosine, pseudouridine, and 5′-methylcytosine; and
   [0309] e. an internucleoside linkage modification such as phosphorothioate.
[0310] Embodiment 107 is the gRNA of any one of the preceding embodiments, comprising a YA modification at one or more conserved region YA sites.
[0311] Embodiment 108 is the gRNA of any one of the preceding embodiments, comprising a YA modification at one or more of conserved region YA sites 2, 3, 4, and 10.
[0312] Embodiment 109 is the gRNA of any one of the preceding embodiments, comprising a YA modification at one or more of conserved region YA sites 1 and 8.
[0313] Embodiment 110 is the gRNA of any one of the preceding embodiments, comprising a YA modification of conserved region YA site 1.
[0314] Embodiment 111 is the gRNA of any one of the preceding embodiments, comprising a YA modification of conserved region YA site 2.
[0315] Embodiment 112 is the gRNA of any one of the preceding embodiments, comprising a YA modification of conserved region YA site 3.
[0316] Embodiment 113 is the gRNA of any one of the preceding embodiments, comprising a YA modification of conserved region YA site 4.
[0317] Embodiment 114 is the gRNA of any one of the preceding embodiments, comprising a YA modification of conserved region YA site 5.
[0318] Embodiment 115 is the gRNA of any one of the preceding embodiments, comprising a YA modification of conserved region YA site 6.
[0319] Embodiment 116 is the gRNA of any one of the preceding embodiments, comprising a YA modification of conserved region YA site 7.
[0320] Embodiment 117 is the gRNA of any one of the preceding embodiments, comprising a YA modification of conserved region YA site 8.
[0321] Embodiment 118 is the gRNA of any one of the preceding embodiments, comprising a YA modification of conserved region YA site 9.
[0322] Embodiment 119 is the gRNA of any one of the preceding embodiments, comprising a YA modification of conserved region YA site 10.
[0323] Embodiment 120 is the gRNA of any one of the preceding embodiments, comprising one or more of:
   [0324] a. YA modifications of conserved region YA sites 2, 3, 4, and 10;
   [0325] b. YA modifications of conserved region YA sites 2, 3, and 4;
   [0326] c. YA modifications of conserved region YA sites 2, 3, and 10;
   [0327] d. YA modifications of conserved region YA sites 2, 4, and 10;
   [0328] e. YA modifications of conserved region YA sites 3, 4, and 10;
   [0329] f. YA modifications of conserved region YA sites 2 and 10;
   [0330] g. YA modifications of conserved region YA sites 2 and 4;
   [0331] h. YA modifications of conserved region YA sites 2 and 3;
   [0332] i. YA modifications of conserved region YA sites 3 and 4;
   [0333] j. YA modifications of conserved region YA sites 3 and 10;
   [0334] k. YA modifications of conserved region YA sites 4 and 10
   [0335] l. YA modifications of conserved region YA sites 1 and 5;
   [0336] m. YA modifications of conserved region YA sites 1 and 6;
   [0337] n. YA modifications of conserved region YA sites 1 and 7;
   [0338] o. YA modifications of conserved region YA sites 1 and 8;
   [0339] p. YA modifications of conserved region YA sites 1 and 9;
   [0340] q. YA modifications of conserved region YA sites 8 and 5;
   [0341] r. YA modifications of conserved region YA sites 8 and 6;
   [0342] s. YA modifications of conserved region YA sites 8 and 7; and
   [0343] t. YA modifications of conserved region YA sites 8 and 9;
      optionally wherein the sgRNA further comprises YA modifications of conserved region YA sites 2, 3, 4, and/or 10.
[0344] Embodiment 121 is the gRNA of any one of the preceding embodiments, wherein at least one modified YA site comprises a 2′-OMe modification, optionally at the pyrimidine of the YA site.
[0345] Embodiment 122 is the gRNA of any one of the preceding embodiments, wherein at least one modified YA site comprises a 2′-fluoro modification, optionally at the pyrimidine of the YA site.
[0346] Embodiment 123 is the gRNA of any one of the preceding embodiments, wherein at least one modified YA site comprises a PS modification, optionally at the pyrimidine of the YA site.
[0347] Embodiment 124 is the gRNA of any one of the preceding embodiments, wherein the gRNA comprises a guide region that comprises modifications at at least 1, 2, 3, 4, 5, 6, 7, 8, 9, 10, 11, 12, 13, or all of the following nucleotides: 1, 2, 3, 4, 6, 7, 8, 9, 10, 11, 13, 14, 17, and 18, optionally wherein the modifications are 2′-OMe, 2′-fluoro, 2′-H, inosine, or phosphorothioate modifications.
[0348] Embodiment 125 is the gRNA of any one of the preceding embodiments, wherein the short-sgRNA comprises a guide region that comprises modifications at nucleotides 1, 2, 3, 4, 6, 7, 8, 9, 10, 11, 13, 14, 17, and 18, optionally wherein the modifications are 2′-OMe, 2′-fluoro, 2′-H, inosine, or phosphorothioate modifications.
[0349] Embodiment 126 is the gRNA of embodiments 124-125, wherein 2′-OMe modifications are not present in the guide region at nucleotides 6-11 and 13-end.
[0350] Embodiment 127 is the gRNA of embodiments 124-126, wherein 2′-fluoro modifications are not present in the guide region at nucleotides 1-7, 15, 16, and 19-end.
[0351] Embodiment 128 is the gRNA of embodiments 124-127, wherein phosphorothioate modifications are not present in the guide region at nucleotides 4, 5, 11-14, 17, and 18.
[0352] Embodiment 129 is the gRNA of embodiments 124-128, wherein the guide region comprises an unmodified nucleotide 20.
[0353] Embodiment 130 is the gRNA of embodiments 124-129, wherein the guide region consists of 20 nucleotides.
[0354] Embodiment 131 is the gRNA of embodiments 124-130, wherein the guide region comprises a YA site at nucleotides 5-6 and a modification at nucleotide 5.
[0355] Embodiment 132 is the gRNA of embodiments 124-131, wherein the guide region comprises a YA site at nucleotides 12-13 and a modification at nucleotide 12.
[0356] Embodiment 133 is the gRNA of embodiments 124-132, wherein the guide region comprises a YA site at nucleotides 15-16 and a modification at nucleotide 15.
[0357] Embodiment 134 is the gRNA of embodiments 124-133, wherein the guide region comprises a YA site at nucleotides 16-17 and a modification at nucleotide 16.
[0358] Embodiment 135 is the gRNA of embodiments 124-134, wherein the guide region comprises a YA site at nucleotides 19-20 and a modification at nucleotide 19.
[0359] Embodiment 136 is the gRNA of embodiments 124-130 or 132-135, wherein the guide region does not comprise a YA site at nucleotides 5-6 and nucleotide 5 is unmodified.
[0360] Embodiment 137 is the gRNA of embodiments 124-131 or 133-136, wherein the guide region does not comprise a YA site at nucleotides 12-13 and nucleotide 12 is unmodified.
[0361] Embodiment 138 is the gRNA of embodiments 124-132 or 134-137, wherein the guide region does not comprise a YA site at nucleotides 15-16 and nucleotide 15 is unmodified.
[0362] Embodiment 139 is the gRNA of embodiments 124-133 or 135-138, wherein the guide region does not comprise a YA site at nucleotides 16-17 and nucleotide 16 is unmodified.
[0363] Embodiment 140 is the gRNA of embodiments 124-134 or 136-139, wherein the guide region does not comprise a YA site at nucleotides 19-20 and nucleotide 19 is unmodified.
[0364] Embodiment 141 is the gRNA of embodiments 124-140, wherein the short-sgRNA comprises a guide region that comprises one or more of the following:
   [0365] (a) 2′-OMe and phosphorothioate modifications at nucleotide 1;
   [0366] (b) 2′-OMe and phosphorothioate modifications at nucleotide 2;
   [0367] (c) 2′-OMe and phosphorothioate modifications at nucleotide 3;
   [0368] (d) a 2′-OMe modification at nucleotide 4;
   [0369] (e) a phosphorothioate modification at nucleotide 6;
   [0370] (f) a phosphorothioate modification at nucleotide 7;
   [0371] (g) 2′-fluoro and phosphorothioate modifications at nucleotide 8;
   [0372] (h) 2′-fluoro and phosphorothioate modifications at nucleotide 9;
   [0373] (i) 2′-fluoro and phosphorothioate modifications at nucleotide 10;
   [0374] (j) a 2′-fluoro modification at nucleotide 11;
   [0375] (k) a 2′-fluoro modifications at nucleotide 13;
   [0376] (l) a 2′-fluoro modifications at nucleotide 14;
   [0377] (m)a 2′-fluoro modifications at nucleotide 17; and
   [0378] (n) a 2′-fluoro modifications at nucleotide 18.
[0379] Embodiment 142 is the gRNA of embodiments 124-141, wherein the guide region comprises each of the modifications set forth in the preceding embodiment.
[0380] Embodiment 143 is the gRNA of embodiments 124-142, wherein the guide region comprises at least 1, 2, 3, or 4 of the following:
   [0381] (a) a 2′-OMe modification at nucleotide 5 if nucleotides 5 and 6 form a YA site;
   [0382] (b) a 2′-OMe modification at nucleotide 12 if nucleotides 12 and 13 form a YA site;
   [0383] (c) a phosphorothioate or 2′-H modification at nucleotide 15 if nucleotides 15 and 16 form a YA site;
   [0384] (d) a phosphorothioate modification at nucleotide 16 if nucleotides 16 and 17 form a YA site; and
   [0385] (e) a phosphorothioate or 2′-fluoro modification at nucleotide 19 if nucleotides 19 and 20 form a YA site.
[0386] Embodiment 144 is the gRNA of embodiments 124-143, wherein the guide region comprises a YA site at nucleotides 5-6 and a 2′-OMe modification at nucleotide 5.
[0387] Embodiment 145 is the gRNA of embodiments 124-144, wherein the guide region comprises a YA site at nucleotides 12-13 and a 2′-OMe modification at nucleotide 12.
[0388] Embodiment 146 is the gRNA of embodiments 124-145, wherein the guide region comprises a YA site at nucleotides 15-16 and a phosphorothioate modification at nucleotide 15.
[0389] Embodiment 147 is the gRNA of embodiments 124-146, wherein the guide region comprises a YA site at nucleotides 16-17 and a phosphorothioate modification at nucleotide 16.
[0390] Embodiment 148 is the gRNA of embodiments 124-147, wherein the guide region comprises a YA site at nucleotides 19-20 and a phosphorothioate modification at nucleotide 19.
[0391] Embodiment 149 is the gRNA of embodiments 124-148, wherein the guide region comprises a 2′-fluoro modification at nucleotide 19.
[0392] Embodiment 150 is the gRNA of embodiments 124-149, wherein the guide region comprises an unmodified nucleotide 15 or only a phosphorothioate modification at nucleotide 15.
[0393] Embodiment 151 is the gRNA of embodiments 124-150, wherein the guide region comprises an unmodified nucleotide 16 or only a phosphorothioate modification at nucleotide 16.
[0394] Embodiment 152 is a guide RNA which is a single guide RNA (sgRNA) comprising:
   [0395] a. a YA modification at two or more guide region YA sites;
   [0396] b. a YA modification at one or more of conserved region YA sites 2, 3, 4, and 10; and
   [0397] c. a YA modification at one or more of conserved region YA sites 1 and 8.
[0398] Embodiment 153 is a guide RNA which is a single guide RNA (sgRNA) comprising:
   [0399] a. a YA modification at one or more guide region YA sites that are at or after nucleotide 8 from the 5′ end of the 5′ terminus;
   [0400] b. a YA modification at one or more of conserved region YA sites 2, 3, 4, and 10; and optionally
   [0401] c. a YA modification at one or more of conserved region YA sites 1 and 8.
[0402] Embodiment 154 is a guide RNA which is a single guide RNA (sgRNA) comprising:
   [0403] a. a YA modification at one or more guide region YA sites that are within 13 nucleotides of the 3′ terminal nucleotide of the guide region;
   [0404] b. a YA modification at one or more of conserved region YA sites 2, 3, 4, and 10; and
   [0405] c. a YA modification at one or more of conserved region YA sites 1 and 8.
[0406] Embodiment 155 is a guide RNA which is a single guide RNA (sgRNA) comprising:
   [0407] a. a 5′ end modification and a 3′ end modification;
   [0408] b. a YA modification at one or more of conserved region YA sites 2, 3, 4, and 10; and
   [0409] c. a YA modification at one or more of conserved region YA sites 1 and 8.
[0410] Embodiment 156 is a guide RNA which is a single guide RNA (sgRNA) comprising:
   [0411] a. a YA modification at at least one guide region YA site, wherein the modification of the guide region YA site comprises a modification at at least one nucleotide located 5′ of the guide region YA site does not comprise;
   [0412] b. a YA modification at one or more of conserved region YA sites 2, 3, 4, and 10; and
   [0413] c. a YA modification at one or more of conserved region YA sites 1 and 8.
[0414] Embodiment 157 is a guide RNA which is a single guide RNA (sgRNA) comprising:
   [0415] a. a YA modification at one or more of conserved region YA sites 2, 3, 4, and 10; and
   [0416] b. a YA modification at conserved region YA sites 1 and 8.
[0417] Embodiment 158 is a guide RNA which is a single guide RNA (sgRNA) comprising:
   [0418] a. a YA modification at one or more guide region YA sites that are at or after nucleotide 8 from the 5′ end of the 5′ terminus;
   [0419] b. a YA modification at one or more of conserved region YA sites 2, 3, 4, and 10; and
   [0420] c. a modification at one or more of H1-1 and H2-1.
[0421] Embodiment 159 is a guide RNA which is a single guide RNA (sgRNA) comprising:
   [0422] a. a YA modification at one or more of conserved region YA sites 2, 3, 4, and 10;
   [0423] b. a YA modification at one or more of conserved region YA sites 1, 5, 6, 7, 8, and 9; and
   [0424] c. a modification at one or more of H1-1 and H2-1.
[0425] Embodiment 160 is a guide RNA which is an sgRNA comprising any one or more of the following:
   [0426] a. a modification, such as a YA modification, at one or more nucleotides located at or after nucleotide 6 from the 5′ end of the 5′ terminus;
   [0427] b. a YA modification at one or more guide sequence YA sites;
   [0428] c. a modification at one or more of B3, B4, and B5, wherein B6 does not comprise a 2′-OMe modification or comprises a modification other than 2′-OMe;
   [0429] d. a modification at LS10, wherein LS10 comprises a modification other than 2′-fluoro; and/or
   [0430] e. a modification at N2, N3, N4, N5, N6, N7, N10, or N11; and
      wherein at least one of the following is true:
   [0431] i. at least one of nucleotides 8-11, 13, 14, 17, or 18 from the 5′ end of the 5′ terminus does not comprise a 2′-fluoro modification;
   [0432] ii. at least one of nucleotides 6-10 from the 5′ end of the 5′ terminus does not comprise a phosphorothioate linkage;
   [0433] iii. at least one of B2, B3, B4, or B5 does not comprise a 2′-OMe modification;
   [0434] iv. at least one of LS1, LS8, or LS10 does not comprise a 2′-OMe modification;
   [0435] v. at least one of N2, N3, N4, N5, N6, N7, N10, N11, N16, or N17 does not comprise a 2′-OMe modification;
   [0436] vi. H1-1 comprises a modification;
   [0437] vii. H2-1 comprises a modification; or
   [0438] viii. at least one of H1-2, H1-3, H1-4, H1-5, H1-6, H1-7, H1-8, H1-9, H1-10, H2-1, H2-2, H2-3, H2-4, H2-5, H2-6, H2-7, H2-8, H2-9, H2-10, H2-11, H2-12, H2-13, H2-14, or H2-15 does not comprise a phosphorothioate linkage.
[0439] Embodiment 161 is a guide RNA comprising any one or more of the following:
   [0440] i. a modification, such as a YA modification, at one or more nucleotides located at or after nucleotide 6 from the 5′ end of the 5′ terminus; or
   [0441] ii. a YA modification at one or more guide sequence YA sites;
      wherein at least one of the following is true:
   [0442] a. at least one of nucleotides 8-11, 13, 14, 17, or 18 from the 5′ end of the 5′ terminus does not comprise a 2′-fluoro modification; or
   [0443] b. at least one of nucleotides 6-10 from the 5′ end of the 5′ terminus does not comprise a phosphorothioate linkage;
      and wherein at least one of the following is also true:
   [0444] c. at least one of nucleotides 7-10 from the 5′ end of the 5′ terminus does not comprise a 2′-OMe modification;
   [0445] d. nucleotide 20 from the 5′ end of the 5′ terminus does not comprise a 2′-OMe modification; or
   [0446] e. the guide RNA comprises a 2′-fluoro modification at any one or more of nucleotides 1-20 from the 5′ end of the 5′ terminus and at least one of nucleotides 11, 12, 13, 14, 17, or 18 from the 5′ end of the 5′ terminus does not comprise a 2′-fluoro modification, optionally wherein nucleotide 12 from the 5′ end of the 5′ terminus does not comprise a 2′-fluoro modification.
[0447] Embodiment 162 is a guide RNA which is an sgRNA comprising a guanosine at N14 and/or one or more of the following:
   [0448] a. a YA modification at one or more guide region YA sites that are at or after nucleotide 8 from the 5′ end of the 5′ terminus;
   [0449] b. a YA modification at one or more of conserved region YA sites 1, 5, and 6, wherein if YA site 6 is modified at LS12 and LS9is not modified, then the modification of LS12 is other than 2′-OMe;
   [0450] c. a modification at LS9, wherein if LS9 is modified and LS5, LS7, and LS12 are not modified, then the modification of LS9 is other than 2′-fluoro,
   [0451] d. a modification at LS12, wherein if LS12 is modified and LS9 is not modified, then the modification of LS12 is other than 2′-OMe;
   [0452] e. a modification at LS8 or LS11, wherein at least one of LS8 and LS11 comprises a modification other than 2′-OMe; and/or
   [0453] f a modification at N6, N14, or N17, wherein if N17 is modified and N6 and N14 are not modified, then the modification of N17 is other than 2′-fluoro and other than 2′-OMe;
      and wherein at least one of the following is true:
   [0454] i. at least one of nucleotides 8-11, 13-14, 17, or 18 from the 5′ end of the 5′ terminus does not comprise a 2′-fluoro modification;
   [0455] ii. at least one of nucleotides 6-10 from the 5′ end of the 5′ terminus does not comprise a phosphorothioate linkage;
   [0456] iii. at least one of B2, B3, B4, or B5 does not comprise a 2′-OMe modification;
   [0457] iv. at least one of LS1, LS8, or LS10 does not comprise a 2′-OMe modification;
   [0458] v. at least one of N2, N3, N4, N5, N6, N7, N10, N11, N16, or N17 does not comprise a 2′-OMe modification;
   [0459] vi. H1-1 comprises a modification;
   [0460] vii. H2-1 comprises a modification; or
   [0461] viii. at least one of H1-2, H1-3, H1-4, H1-5, H1-6, H1-7, H1-8, H1-9, H1-10, H2-1, H2-2, H2-3, H2-4, H2-5, H2-6, H2-7, H2-8, H2-9, H2-10, H2-11, H2-12, H2-13, H2-14, or H2-15 does not comprise a phosphorothioate linkage.
[0462] Embodiment 163 is the gRNA of embodiments 161 or 162, comprising:
   [0463] a. a YA modification at 1, 2, 3, 4, or 5 guide region YA sites;
   [0464] b. a YA modification at 1, 2, 3, 4, or 5 guide region YA sites, wherein the modification of at least one guide region YA site is different from any 5′ end modification of the sgRNA;
   [0465] c. a YA modification at one or more guide region YA sites that are at or after nucleotide 8 from the 5′ end of the 5′ terminus;
   [0466] d. a YA modification at one or more guide region YA sites that are is within nucleotides 5-end, 6-end, 7-end, 8-end, 9-end, or 10-end from the 5′ end of the 5′ terminus;
   [0467] e. a YA modification at one or more guide region YA sites that are within 17, 16, 15, 14, 13, 12, 11, 10, or 9 nucleotides of the 3′ terminal nucleotide of the guide region;
   [0468] f a YA modification at a guide region YA site other than a 5′ end modification; or
   [0469] g. a YA modification at a guide region YA site, wherein the modification of the guide region YA site comprises a modification at at least one nucleotide located 5′ of the guide region YA site does not comprise.
[0470] Embodiment 164 is the gRNA of embodiment 163, comprising:
   [0471] a. a YA modification at two or more guide region YA sites that are at or after nucleotide 8 from the 5′ end of the 5′ terminus;
   [0472] b. a YA modification at two or more guide region YA sites that are within nucleotides 5-end, 6-end, 7-end, 8-end, 9-end, or 10-end from the 5′ end of the 5′ terminus;
   [0473] c. a YA modification at two or more guide region YA sites that are within 17, 16, 15, 14, 13, 12, 11, 10, or 9 nucleotides of the 3′ terminal nucleotide of the guide region;
   [0474] d. a YA modification at two or more guide region YA sites other than a 5′ end modification; or
   [0475] e. a YA modification at a two or more guide region YA sites, wherein the modifications of the guide region YA sites comprise a modification at at least one nucleotide located 5′ of the guide region YA site does not comprise.
[0476] Embodiment 165 is the gRNA of embodiment 163, comprising:
   [0477] a. a YA modification at three or more guide region YA sites that are at or after nucleotide 8 from the 5′ end of the 5′ terminus;
   [0478] b. a YA modification at three or more guide region YA sites that are within nucleotides 5-end, 6-end, 7-end, 8-end, 9-end, or 10-end from the 5′ end of the 5′ terminus;
   [0479] c. a YA modification at three or more guide region YA sites that are within 17, 16, 15, 14, 13, 12, 11, 10, or 9 nucleotides of the 3′ terminal nucleotide of the guide region;
   [0480] d. a YA modification at three or more guide region YA sites other than a 5′ end modification; or
   [0481] e. a YA modification at a three or more guide region YA sites, wherein the modifications of the guide region YA sites comprise a modification at at least one nucleotide located 5′ of the guide region YA site does not comprise.
[0482] Embodiment 166 is the gRNA of any one of embodiments 161-165, comprising at least one YA modification at nucleotide 6 from the 5′ end of the 5′ terminus.
[0483] Embodiment 167 is the gRNA of any one of embodiments 161-166, comprising at least one YA modification at nucleotide 7 from the 5′ end of the 5′ terminus.
[0484] Embodiment 168 is the gRNA of any one of embodiments 161-167, comprising at least one YA modification at nucleotide 8 from the 5′ end of the 5′ terminus.
[0485] Embodiment 169 is the gRNA of any one of embodiments 161-168, comprising at least one YA modification at nucleotide 9 from the 5′ end of the 5′ terminus.
[0486] Embodiment 170 is the gRNA of any one of embodiments 161-169, comprising at least one YA modification at nucleotide 10 from the 5′ end of the 5′ terminus.
[0487] Embodiment 171 is the gRNA of any one of embodiments 161-170, comprising at least one YA modification at nucleotide 11 from the 5′ end of the 5′ terminus.
[0488] Embodiment 172 is the gRNA of any one of embodiments 161-171, comprising at least one YA modification at nucleotide 12 from the 5′ end of the 5′ terminus.
[0489] Embodiment 173 is the gRNA of any one of embodiments 161-172, comprising at least one YA modification at nucleotide 13 from the 5′ end of the 5′ terminus.
[0490] Embodiment 174 is the gRNA of any one of embodiments 161-173, comprising at least one YA modification at nucleotide 14 from the 5′ end of the 5′ terminus.
[0491] Embodiment 175 is the gRNA of any one of embodiments 161-174, comprising at least one YA modification at nucleotide 15 from the 5′ end of the 5′ terminus.
[0492] Embodiment 176 is the gRNA of any one of embodiments 161-175, comprising at least one YA modification at nucleotide 16 from the 5′ end of the 5′ terminus.
[0493] Embodiment 177 is the gRNA of any one of embodiments 161-176, comprising at least one YA modification at nucleotide 17 from the 5′ end of the 5′ terminus.
[0494] Embodiment 178 is the gRNA of any one of embodiments 161-177, comprising at least one YA modification at nucleotide 18 from the 5′ end of the 5′ terminus.
[0495] Embodiment 179 is the gRNA of any one of embodiments 161-178, comprising at least one YA modification at nucleotide 19 from the 5′ end of the 5′ terminus.
[0496] Embodiment 180 is the gRNA of any one of embodiments 161-179, comprising at least one YA modification at nucleotide 20 from the 5′ end of the 5′ terminus.
[0497] Embodiment 181 is the gRNA of any one of embodiments 161-180, wherein at least 1, 2, 3, 4, 5, 6, 7, or 8 of nucleotides 8-11, 13-14, and 17-18 from the 5′ end of the 5′ terminus comprise a YA modification, optionally wherein the modification comprises 2′-fluoro, 2′-H, 2′-OMe, or PS.
[0498] Embodiment 182 is the gRNA of embodiment 181, wherein the modification is 2′-fluoro.
[0499] Embodiment 183 is the gRNA of embodiment 181, wherein the modification is 2′-OMe or 2′-H.
[0500] Embodiment 184 is the gRNA of embodiment 181, wherein the modification is PS.
[0501] Embodiment 185 is the gRNA of any one of embodiments 161-184, wherein at least 1, 2, 3, 4, or 5 of nucleotides 6-10 from the 5′ terminus comprise a YA modification, optionally wherein the modification comprises 2′-fluoro, 2′-H, 2′-OMe, inosine, or PS.
[0502] Embodiment 186 is the gRNA of embodiment 185, wherein the modification is PS.
[0503] Embodiment 187 is the gRNA of embodiment 185, wherein the modification is 2′-fluoro or 2′-H.
[0504] Embodiment 188 is the gRNA of embodiment 185, wherein the modification is 2′-OMe.
[0505] Embodiment 189 is the gRNA of any one of embodiments 161-188, comprising any one or more of the following:
   [0506] a. 1, 2, 3, 4, 5, 6, 7, or 8 YA modifications of nucleotides 8-11, 13-14, and 17-18 from the 5′ end of the 5′ terminus, wherein the YA modifications are optionally 2′-fluoro modifications, and a modification other than 2′-fluoro at one or more of nucleotides 6-10 from the 5′ end of the 5′ terminus;
   [0507] b. a YA modification other than PS at one or more of nucleotides 8-11, 13-14, and 17-18 from the 5′ end of the 5′ terminus, and 1, 2, 3, 4, or 5 YA modifications at nucleotides 6-10 from the 5′ end of the 5′ end of the 5′ terminus, optionally wherein the modifications are PS modifications;
   [0508] c. 1, 2, 3, 4, 5, 6, 7, or 8 YA modifications at nucleotides 8-11, 13-14, and 17-18 from the 5′ end of the 5′ terminus, wherein the YA modifications are optionally 2′-fluoro modifications, and modifications other than 2′-fluoro at nucleotides 6-10 from the 5′ end of the 5′ terminus;
   [0509] d. YA modifications other than PS at each of nucleotides 8-11, 13-14, and 17-18 from the 5′ end of the 5′ end of the 5′ terminus, and 1, 2, 3, 4, or 5 YA modifications at nucleotides 6-10 from the 5′ end of the 5′ terminus, wherein the modifications are optionally PS modifications;
   [0510] e. 1, 2, 3, 4, 5, 6, 7, or 8 YA modifications at nucleotides 8-11, 13-14, and 17-18 from the 5′ end of the 5′ terminus, wherein the YA modifications are optionally 2′-fluoro modifications, and one or more PS modification at any one of nucleotides 6-10 from the 5′ end of the 5′ terminus;
   [0511] f. at least one 2′-fluoro modification at any one of nucleotides 8-11, 13-14, and 17-18 from the 5′ end of the 5′ terminus, and 1, 2, 3, 4, or 5 YA modifications of nucleotides 6-10 from the 5′ end of the 5′ terminus, wherein the modifications are optionally PS modifications;
   [0512] g. 1, 2, 3, 4, 5, 6, 7, or 8 YA modifications of nucleotides 8-11, 13-14, and 17-18 from the 5′ end of the 5′ terminus, wherein the YA modifications are optionally 2′-fluoro modifications, and a PS modification at each of nucleotides 6-10 from the 5′ end of the 5′ terminus; or
   [0513] h. a 2′-fluoro modification at each of nucleotides 8-11, 13-14, and 17-18 from the 5′ end of the 5′ terminus, and 1, 2, 3, 4, or 5 YA modifications of nucleotides 6-10 from the 5′ end of the 5′ terminus, wherein the modifications are optionally PS modifications.
[0514] Embodiment 190 is the gRNA of any one of embodiments 161-189, wherein:
   [0515] a. nucleotides 4-20 from the 5′ end of the 5′ terminus comprise at least 2, 3, or 4 modified YA sites including a first modified YA site comprising a 2′-OMe modification and a second modified YA site comprising a 2′-fluoro modification or a PS modification;
   [0516] b. nucleotides 4-20 from the 5′ end of the 5′ terminus comprise at least 2, 3, or 4 modified YA sites including a first modified YA site comprising a 2′-fluoro modification and a second modified YA site comprising a 2′-OMe modification or a PS modification;
   [0517] c. nucleotides 4-20 from the 5′ end of the 5′ terminus comprise at least 2, 3, or 4 modified YA sites including a first modified YA site comprising a PS modification and a second modified YA site comprising a 2′-OMe modification or a 2′-fluoro modification;
   [0518] d. nucleotides 4-20 from the 5′ end of the 5′ terminus comprise at least 2, 3, or 4 modified YA sites including a YA modification;
   [0519] e. nucleotides 4-20 from the 5′ end of the 5′ terminus comprise at least 3 or 4 modified YA sites including a first modified YA site comprising a 2′-OMe modification, a second modified YA site comprising a 2′-fluoro modification, and a third modified YA site comprising a PS modification;
   [0520] f. nucleotides 4-20 from the 5′ end of the 5′ terminus comprise at least 3 or 4 modified YA sites including a first modified YA site comprising a 2′-OMe modification, a second modified YA site comprising a 2′-fluoro modification, a third modified YA site comprising a 2′-fluoro modification, and a fourth modified YA site comprising a PS modification;
   [0521] g. nucleotides 4-20 from the 5′ end of the 5′ terminus comprise at least 3 or 4 modified YA sites including a YA modification;
   [0522] h. nucleotides 4-20 from the 5′ end of the 5′ terminus comprise at least 4 modified YA sites including a first modified YA site comprising a 2′-OMe modification, a second modified YA site comprising a 2′-fluoro modification, a third modified YA site comprising a PS modification, and a fourth modified YA site comprising a PS modification; or
   [0523] i. nucleotides 4-40 from the 5′ end of the 5′ terminus comprise at least 4 modified YA sites including a YA modification.
[0524] Embodiment 191 is the gRNA of any one of embodiments 161-190, wherein nucleotides 4-20 from the 5′ end of the 5′ terminus comprise at least 5 modified YA sites.
[0525] Embodiment 192 is the gRNA of any one of embodiments 161-191, wherein the at least 5 modified YA sites include a fifth modified YA site comprising a PS modification, optionally wherein the third modified YA site comprises a 2′-fluoro modification.
[0526] Embodiment 193 is the gRNA of any one of embodiments 161-192, wherein the first, second, and (if applicable) third, fourth, and fifth of the at least 5 modified YA sites are arranged in the 5′ to 3′ direction.
[0527] Embodiment 194 is the gRNA of any one of embodiments 161-193, wherein the first, second, and (if applicable) third, fourth, and fifth of the at least 5 modified YA sites are not arranged in the 5′ to 3′ direction.
[0528] Embodiment 195 is the gRNA of any one of embodiments 161-194, wherein nucleotides 4-20 from the 5′ end of the 5′ terminus comprise at least 2, 3, 4, or 5 modified YA sites comprising a deoxyribonucleotide, optionally wherein the deoxyribonucleotide is the pyrimidine of the YA sites.
[0529] Embodiment 196 is the gRNA of any one of embodiments 161-195, wherein:
   [0530] a. at least 1, 2, 3, or 4 of nucleotides 8-11 from the 5′ end of the 5′ terminus comprise a YA modification, which is optionally a 2′-fluoro modification;
   [0531] b. at least 1, 2, 3, 4, 5, 6, 7, or 8 of nucleotides 8-11, 13, 14, 17, and 18 from the 5′ end of the 5′ terminus comprise a YA modification, optionally wherein the YA modifications are 2′-OMe if present at nucleotides 8-11 and 2′-fluoro if present at nucleotides 13, 14, 17, or 18;
   [0532] c. at least one or both of nucleotides 17 and 18 from the 5′ end of the 5′ terminus comprise a YA modification, which is optionally a 2′-fluoro modification;
   [0533] d. at least one or both of nucleotides 17 and 18 from the 5′ end of the 5′ terminus comprise a YA modification, which is optionally a 2′-fluoro modification; or
   [0534] e. at least 1, 2, 3, 4, 5, 6, 7, 8, 9, 10, 11, 12, or 13 of nucleotides 4-14, 17, and 18 from the 5′ end of the 5′ terminus comprise a YA modification, which is optionally a 2′-fluoro modification.
[0535] Embodiment 197 is the gRNA of any one of embodiments 161-196, wherein at least 1, 2, 3, 4, 5, or 6 of nucleotides 4-10 from the 5′ end of the 5′ terminus comprise a YA modification, which is optionally a 2′-OMe modification.
[0536] Embodiment 198 is the gRNA of any one of embodiments 161-197, wherein nucleotides 4-10 from the 5′ end of the 5′ terminus comprise a YA modification, which is optionally a 2′-OMe modification.
[0537] Embodiment 199 is the gRNA of any one of embodiments 161-198, wherein:
   [0538] a. at least one of nucleotides 1-3 from the 5′ end of the 5′ terminus comprise a 5′ protective end modification, which is optionally a 2′-OMe modification;
   [0539] b. at least two of nucleotides 1-3 from the 5′ end of the 5′ terminus comprise a 5′ protective end modification, which is optionally a 2′-OMe modification; or
   [0540] c. each of nucleotides 1-3 from the 5′ end of the 5′ terminus comprise a 5′ protective end modification, which is optionally a 2′-OMe modification.
[0541] Embodiment 200 is the gRNA of any one of embodiments 161-199, wherein at least 1, 2, 3, 4, or 5 of nucleotides 11, 13, 14, 17, and 18 from the 5′ end of the 5′ terminus comprise a 5′ end modification, which is optionally a 2′-fluoro modification.
[0542] Embodiment 201 is the gRNA of any one of embodiments 161-200, wherein nucleotide 15 from the 5′ end of the 5′ terminus is unmodified or modified only with phosphorothioate.
[0543] Embodiment 202 is the gRNA of any one of embodiments 161-200, wherein nucleotide 16 from the 5′ end of the 5′ terminus is unmodified or modified only with phosphorothioate.
[0544] Embodiment 203 is the gRNA of any one of the preceding embodiments, wherein nucleotide 3 from the 5′ end of the 5′ terminus is unmodified or modified only with phosphorothioate.
[0545] Embodiment 204 is the gRNA of any one of embodiments 161-203, which is a crRNA or dgRNA.
[0546] Embodiment 205 is the gRNA of any one of embodiments 161-203, which is an sgRNA.
[0547] Embodiment 206 is the gRNA of any one of embodiments 161-203, which is a short-sgRNA.
[0548] Embodiment 207 is the gRNA of any one of embodiment 205 or 206, comprising a YA modification of conserved region YA site 1.
[0549] Embodiment 208 is the gRNA of any one of embodiments 205-207, comprising a YA modification of conserved region YA site 2.
[0550] Embodiment 209 is the gRNA of any one of embodiments 205-208, comprising a YA modification of conserved region YA site 3.
[0551] Embodiment 210 is the gRNA of any one of embodiments 205-209, comprising a YA modification of conserved region YA site 4.
[0552] Embodiment 211 is the gRNA of any one of embodiments 205-210, comprising a YA modification of conserved region YA site 5.
[0553] Embodiment 212 is the gRNA of any one of embodiments 205-211, comprising a YA modification of conserved region YA site 6.
[0554] Embodiment 213 is the gRNA of any one of embodiments 205-212, comprising a YA modification of conserved region YA site 7.
[0555] Embodiment 214 is the gRNA of any one of embodiments 205-213, comprising a YA modification of conserved region YA site 8.
[0556] Embodiment 215 is the gRNA of any one of embodiments 205-214, comprising a YA modification of conserved region YA site 9.
[0557] Embodiment 216 is the gRNA of any one of embodiments 205-215, comprising a YA modification of conserved region YA site 10.
[0558] Embodiment 217 is the gRNA of any one of embodiments 205-216, comprising:
   [0559] a. YA modifications of conserved region YA sites 2, 3, 4, and 10;
   [0560] b. YA modifications of conserved region YA sites 2, 3, and 4;
   [0561] c. YA modifications of conserved region YA sites 2, 3, and 10;
   [0562] d. YA modifications of conserved region YA sites 2, 4, and 10;
   [0563] e. YA modifications of conserved region YA sites 3, 4, and 10;
   [0564] f. YA modifications of conserved region YA sites 2 and 10;
   [0565] g. YA modifications of conserved region YA sites 2 and 4;
   [0566] h. YA modifications of conserved region YA sites 2 and 3;
   [0567] i. YA modifications of conserved region YA sites 3 and 4;
   [0568] j. YA modifications of conserved region YA sites 3 and 10; or
   [0569] k. YA modifications of conserved region YA sites 4 and 10.
[0570] Embodiment 218 is the gRNA of any one of embodiments 205-217, comprising:
   [0571] a. YA modifications of conserved region YA sites 1 and 5;
   [0572] b. YA modifications of conserved region YA sites 1 and 6;
   [0573] c. YA modifications of conserved region YA sites 1 and 7;
   [0574] d. YA modifications of conserved region YA sites 1 and 8;
   [0575] e. YA modifications of conserved region YA sites 1 and 9;
   [0576] f. YA modifications of conserved region YA sites 8 and 5;
   [0577] g. YA modifications of conserved region YA sites 8 and 6;
   [0578] h. YA modifications of conserved region YA sites 8 and 7; or
   [0579] i. YA modifications of conserved region YA sites 8 and 9;
      optionally wherein the sgRNA further comprises YA modifications of conserved region YA sites 2, 3, 4, and 10.
[0580] Embodiment 219 is the gRNA of any one of embodiments 205-218, wherein at least one modified YA site comprises a 2′-OMe modification, optionally at the pyrimidine of the YA site.
[0581] Embodiment 220 is the gRNA of any one of embodiments 205-219, wherein at least one modified YA site comprises a 2′-fluoro modification, optionally at the pyrimidine of the YA site.
[0582] Embodiment 221 is the gRNA of any one of embodiments 205-220, wherein at least one modified YA site comprises a PS modification, optionally at the pyrimidine of the YA site.
[0583] Embodiment 222 is the gRNA of any one of embodiments 205-221, wherein at least 2, 3, 4, 5, 6, 7, 8, 9, or 10 modified YA sites comprise a 2′-OMe modification, optionally at the pyrimidines of the YA sites.
[0584] Embodiment 223 is the gRNA of any one of embodiments205-222, wherein at least 2, 3, 4, 5, 6, 7, 8, 9, or 10 modified YA sites comprise a 2′-fluoro modification, optionally at the pyrimidines of the YA sites.
[0585] Embodiment 224 is the gRNA of any one of embodiments205-223, wherein at least 2, 3, 4, 5, 6, 7, 8, 9, or 10 modified YA sites comprise a PS modification, optionally at the pyrimidines of the YA sites.
[0586] Embodiment 225 is the gRNA of any one of embodiments205-224, wherein at least 2, 3, 4, 5, 6, 7, 8, 9, or 10 modified YA sites comprise a ribose modification at the 2′ position, optionally at the pyrimidines of the YA sites, and optionally chosen from a 2′-O-alkyl, 2′-H, and 2′-fluoro modification.
[0587] Embodiment 226 is the gRNA of any one of embodiments 205-225, wherein:
   [0588] a. conserved region YA sites 1 and 8 comprise 2′-fluoro modifications, optionally at the pyrimidines of the YA sites;
   [0589] b. conserved region YA sites 5 and 6; 5 and 7; 5 and 9; 6 and 7; 6 and 9; 5, 6, and 7; 5, 6, and 9; 6, 7, and 9; or 5, 6, 7, and 9 comprise 2′-OMe modifications, optionally at the pyrimidines of the YA sites;
   [0590] c. conserved region YA site 1 comprises a 2′-fluoro modification and conserved region YA sites 5 and 6; 5 and 7; 5 and 9; 6 and 7; 6 and 9; 5, 6, and 7; 5, 6, and 9; 6, 7, and 9; or 5, 6, 7, and 9 comprise 2′-OMe modifications, optionally at the pyrimidines of the YA sites;
   [0591] d. conserved region YA site 8 comprises a 2′-fluoro modification and conserved region YA sites 5 and 6; 5 and 7; 5 and 9; 6 and 7; 6 and 9; 5, 6, and 7; 5, 6, and 9; 6, 7, and 9; or 5, 6, 7, and 9 comprise 2′-OMe modifications, optionally at the pyrimidines of the YA sites;
   [0592] e. conserved region YA site 1 comprises a 2′-fluoro modification at the pyrimidine of the YA sites and YA sites 5 and 6; 5 and 7; 5 and 9; 6 and 7; 6 and 9; 5, 6, and 7; 5, 6, and 9; 6, 7, and 9; or 5, 6, 7, and 9 comprise 2′-OMe modifications, optionally at the pyrimidines of the YA sites;
   [0593] f. conserved region YA site 8 comprises a 2′-fluoro modification at the pyrimidine of the YA site and YA sites 5 and 6; 5 and 7; 5 and 9; 6 and 7; 6 and 9; 5, 6, and 7; 5, 6, and 9; 6, 7, and 9; or 5, 6, 7, and 9 comprise 2′-OMe modifications, optionally at the pyrimidines of the YA sites;
   [0594] g. conserved region YA sites 1 and 8 comprise 2′-fluoro modifications and conserved region YA sites 5 and 6; 5 and 7; 5 and 9; 6 and 7; 6 and 9; 5, 6, and 7; 5, 6, and 9; 6, 7, and 9; or 5, 6, 7, and 9 comprise 2′-OMe modifications, optionally at the pyrimidines of the YA sites; or
   [0595] h. conserved region YA sites 1 and 8 comprise 2′-fluoro modifications at the pyrimidines of the YA sites and conserved region YA sites 5 and 6; 5 and 7; 5 and 9; 6 and 7; 6 and 9; 5, 6, and 7; 5, 6, and 9; 6, 7, and 9; or 5, 6, 7, and 9 comprise 2′-OMe modifications, optionally at the pyrimidines of the YA sites.
[0596] Embodiment 227 is the gRNA of any one of embodiments 205-226, wherein conserved region YA sites 7 and 9 comprise YA modifications, which are optionally 2′-OMe modifications.
[0597] Embodiment 228 is the gRNA of any one of embodiments 205-227, wherein conserved region YA sites 5, 6, 7, and 9 comprise YA modifications, which are optionally 2′-OMe modifications.
[0598] Embodiment 229 is the gRNA of any one of embodiments 205-228, wherein conserved region YA site 8 comprises a 2′-fluoro modification.
[0599] Embodiment 230 is the gRNA of any one of embodiments 205-229, wherein conserved region YA site 8 comprises a deoxyribonucleotide modification.
[0600] Embodiment 231 is the gRNA of any one of embodiments 205-230, wherein conserved region YA site 8 is abolished by a base substitution, optionally wherein the base substitution eliminates the uracil of YA site 8, further optionally wherein the base substitution is a uracil to guanine substitution.
[0601] Embodiment 232 is the gRNA of any one of embodiments 205-231, wherein conserved region YA site 1 comprises a 2′-fluoro modification.
[0602] Embodiment 233 is the gRNA of any one of embodiments 205-232, wherein conserved region YA site 1 comprises a PS modification.
[0603] Embodiment 234 is the gRNA of any one of embodiments 205-233, wherein 1, 2, 3, 4, 5, 6, or 7 of LS5, LS7, LS8, LS9, LS10, LS11, and LS12 comprise modifications, optionally wherein the modifications are 2′-fluoro and/or 2′-OMe modifications.
[0604] Embodiment 235 is the gRNA of any one of embodiments 205-234, wherein modifications at LS5, LS7, LS9, and LS11, if present, comprise 2′-fluoro modifications, optionally wherein each of LS5, LS7, LS9, and LS11 comprise 2′-fluoro modifications.
[0605] Embodiment 236 is the gRNA of any one of embodiments 205-235, wherein modifications at LS8, LS10, and LS12, if present, comprise 2′-OMe modifications, optionally wherein each of LS8, LS10, and LS12 comprise 2′-OMe modifications.
[0606] Embodiment 237 is the gRNA of any one of embodiments 205-236, wherein 1, 2, 3, 4, 5, 6, 7, 8, 9, or 10 of N2, N3, N4, N5, N6, N7, N10, N11, N16, and N17 comprise modifications, which are optionally 2′-OMe modifications.
[0607] Embodiment 238 is the gRNA of any one of embodiments 205-237, wherein H2-2 comprises a modification, optionally wherein H2 is otherwise unmodified.
[0608] Embodiment 239 is the gRNA of any one of embodiments 205-238, wherein H2-2 comprises a 2′-OMe modification.
[0609] Embodiment 240 is the gRNA of any one of embodiments 205-239, wherein US3, US9, and US12 comprise modifications, optionally wherein the US is otherwise unmodified.
[0610] Embodiment 241 is the gRNA of any one of embodiments 205-240, wherein US3, US9, and US12 comprise 2′-OMe modifications.
[0611] Embodiment 242 is the gRNA of any one of embodiments 205-241, wherein nucleotides 6-10 from the 5′ end of the 5′ terminus comprise a PS modification and nucleotides 8-11, 13, 14, 17, and 18 from the 5′ end of the 5′ terminus comprise a 2′-fluoro modification.
[0612] Embodiment 243 is the gRNA of any one of embodiments 205-242, wherein each guide region YA site comprises a 2′-fluoro modification, optionally excepting nucleotides 15 and/or 16 from the 5′ end of the 5′ terminus.
[0613] Embodiment 244 is the gRNA of any one of embodiments 205-243, wherein nucleotides 4, 8, and 11 from the 5′ end of the 5′ terminus comprise YA modifications, optionally wherein nucleotide 4 comprises a 2′-OMe modification and nucleotides 8 and 11 comprise a 2′-fluoro modification.
[0614] Embodiment 245 is the gRNA of any one of embodiments 205-244, wherein 1, 2, 3, 4, 5, 6, 7, 8, 9, 10, 11, 12, 13, 14, 15, or more modified YA sites comprise a YA modification at the pyrimidine position of the YA site.
[0615] Embodiment 246 is the gRNA of embodiment 245, wherein 1, 2, 3, 4, 5, 6, 7, 8, 9, or 10 modified conserved region YA sites comprise a YA modification at the pyrimidine position of the YA site.
[0616] Embodiment 247 is the gRNA of any one of embodiments 205-246, wherein 1, 2, 3, 4, 5, 6, 7, 8, 9, 10, 11, 12, 13, 14, 15, or more modified YA sites comprise a YA modification at the adenine position of the YA site.
[0617] Embodiment 248 is the gRNA of embodiment 247, wherein 1, 2, 3, 4, 5, 6, 7, 8, 9, or 10 modified conserved region YA sites comprise a YA site modification at the adenine position of the YA site.
[0618] Embodiment 249 is the gRNA of any one of embodiments 205-248, comprising:
   [0619] a. a modification of H1-1;
   [0620] b. a modification of H2-1; or
   [0621] c. modifications of H1-1 and H2-1.
[0622] Embodiment 250 is the gRNA of embodiment 249, wherein H1-1 and/or H2-1 comprises a 2′-OMe modification.
[0623] Embodiment 251 is the gRNA of embodiment 250, wherein H1-1 and/or H2-1 comprises a 2′-fluoro modification.
[0624] Embodiment 252 is the gRNA of embodiment 251, wherein H1-1 and/or H2-1 comprises a PS modification.
[0625] Embodiment 253 is the gRNA of any one of embodiments 205-252, comprising a modification at B3, optionally wherein B6 does not comprise a 2′-OMe modification or comprises a modification other than 2′-OMe.
[0626] Embodiment 254 is the gRNA of any one of embodiments 205-253, comprising a modification at B4, optionally wherein B6 does not comprise a 2′-OMe modification or comprises a modification other than 2′-OMe.
[0627] Embodiment 255 is the gRNA of any one of embodiments 205-254, comprising a modification at B5, optionally wherein B6 does not comprise a 2′-OMe modification or comprises a modification other than 2′-OMe.
[0628] Embodiment 256 is the gRNA of any one of embodiments 205-255, comprising a modification at LS10, optionally wherein LS10 comprises a modification other than 2′-fluoro.
[0629] Embodiment 257 is the gRNA of any one of embodiments 205-256, comprising a modification at N2.
[0630] Embodiment 258 is the gRNA of any one of embodiments 205-257, comprising a modification at N3.
[0631] Embodiment 259 is the gRNA of any one of embodiments 205-258, comprising a modification at N4.
[0632] Embodiment 260 is the gRNA of any one of embodiments 205-259, comprising a modification at N5.
[0633] Embodiment 261 is the gRNA of any one of embodiments 205-260, comprising a modification at N6.
[0634] Embodiment 262 is the gRNA of any one of embodiments 205-261, comprising a modification at N7.
[0635] Embodiment 263 is the gRNA of any one of embodiments 205-262, comprising a modification at N10.
[0636] Embodiment 264 is the gRNA of any one of embodiments 205-263, comprising a modification at N11.
[0637] Embodiment 265 is the gRNA of any one of embodiments 205-264, wherein:
   [0638] a. nucleotide 8 from the 5′ end of the 5′ terminus does not comprise a 2′-fluoro modification;
   [0639] b. nucleotide 9 from the 5′ end of the 5′ terminus does not comprise a 2′-fluoro modification;
   [0640] c. nucleotide 10 from the 5′ end of the 5′ terminus does not comprise a 2′-fluoro modification;
   [0641] d. nucleotide 11 from the 5′ end of the 5′ terminus does not comprise a 2′-fluoro modification;
   [0642] e. nucleotide 13 from the 5′ end of the 5′ terminus does not comprise a 2′-fluoro modification;
   [0643] f. nucleotide 14 from the 5′ end of the 5′ terminus does not comprise a 2′-fluoro modification;
   [0644] g. nucleotide 17 from the 5′ end of the 5′ terminus does not comprise a 2′-fluoro modification; and/or
   [0645] h. nucleotide 18 from the 5′ end of the 5′ terminus does not comprise a 2′-fluoro modification.
[0646] Embodiment 266 is the gRNA of any one of embodiments 205-265, wherein:
   [0647] a. nucleotide 6 from the 5′ end of the 5′ terminus does not comprise a 2′-fluoro modification;
   [0648] b. nucleotide 7 from the 5′ end of the 5′ terminus does not comprise a 2′-fluoro modification;
   [0649] c. nucleotide 8 from the 5′ end of the 5′ terminus does not comprise a 2′-fluoro modification;
   [0650] d. nucleotide 9 from the 5′ end of the 5′ terminus does not comprise a 2′-fluoro modification; and/or
   [0651] e. nucleotide 10 from the 5′ end of the 5′ terminus does not comprise a 2′-fluoro modification.
[0652] Embodiment 267 is the gRNA of any one of embodiments 205-266, wherein:
   [0653] a. nucleotide 6 from the 5′ end of the 5′ terminus does not comprise a phosphorothioate linkage;
   [0654] b. nucleotide 7 from the 5′ end of the 5′ terminus does not comprise a phosphorothioate linkage;
   [0655] c. nucleotide 8 from the 5′ end of the 5′ terminus does not comprise a phosphorothioate linkage;
   [0656] d. nucleotide 9 from the 5′ end of the 5′ terminus does not comprise a phosphorothioate linkage; and/or
   [0657] e. nucleotide 10 from the 5′ end of the 5′ terminus does not comprise a phosphorothioate linkage.
[0658] Embodiment 268 is the gRNA of any one of embodiments 205-267, wherein:
   [0659] a. nucleotide 7 from the 5′ end of the 5′ terminus does not comprise a 2′-OMe modification;
   [0660] b. nucleotide 8 from the 5′ end of the 5′ terminus does not comprise a 2′-OMe modification;
   [0661] c. nucleotide 9 from the 5′ end of the 5′ terminus does not comprise a 2′-OMe modification; and/or
   [0662] d. nucleotide 10 from the 5′ end of the 5′ terminus does not comprise a 2′-OMe modification.
[0663] Embodiment 269 is the gRNA of any one of embodiments 205-268, wherein nucleotide 20 from the 5′ end of the 5′ terminus does not comprise a 2′-OMe modification.
[0664] Embodiment 270 is the gRNA of any one of embodiments 205-269, wherein the guide RNA comprises a 2′-fluoro modification at any one or more of nucleotides 1-11 and 13-20 from the 5′ end of the 5′ terminus and nucleotide 12 from the 5′ end of the 5′ terminus does not comprise a 2′-fluoro modification.
[0665] Embodiment 271 is the gRNA of any one of embodiments 205-270, wherein the guide RNA comprises a 2′-fluoro modification at any one or more of nucleotides 1-20 from the 5′ end of the 5′ terminus and:
   [0666] a. nucleotide 11 from the 5′ end of the 5′ terminus does not comprise a 2′-fluoro modification;
   [0667] b. nucleotide 12 from the 5′ end of the 5′ terminus does not comprise a 2′-fluoro modification;
   [0668] c. nucleotide 13 from the 5′ end of the 5′ terminus does not comprise a 2′-fluoro modification;
   [0669] d. nucleotide 14 from the 5′ end of the 5′ terminus does not comprise a 2′-fluoro modification;
   [0670] e. nucleotide 17 from the 5′ end of the 5′ terminus does not comprise a 2′-fluoro modification; and/or
   [0671] f. nucleotide 18 from the 5′ end of the 5′ terminus does not comprise a 2′-fluoro modification.
[0672] Embodiment 272 is the gRNA of any one of embodiments 205-271, wherein:
   [0673] a. B2 does not comprise a 2′-OMe modification;
   [0674] b. B3 does not comprise a 2′-OMe modification;
   [0675] c. B4 does not comprise a 2′-OMe modification; and/or
   [0676] d. B5 does not comprise a 2′-OMe modification.
[0677] Embodiment 273 is the gRNA of any one of embodiments 205-272, wherein:
   [0678] a. LS1 does not comprise a 2′-OMe modification;
   [0679] b. LS8 does not comprise a 2′-OMe modification; and/or
   [0680] c. LS10 does not comprise a 2′-OMe modification.
[0681] Embodiment 274 is the gRNA of any one of embodiments 205-273, wherein:
   [0682] a. N2 does not comprise a 2′-OMe modification;
   [0683] b. N3 does not comprise a 2′-OMe modification;
   [0684] c. N4 does not comprise a 2′-OMe modification;
   [0685] d. N5 does not comprise a 2′-OMe modification;
   [0686] e. N6 does not comprise a 2′-OMe modification;
   [0687] f. N7 does not comprise a 2′-OMe modification;
   [0688] g. N10 does not comprise a 2′-OMe modification;
   [0689] h. N11 does not comprise a 2′-OMe modification;
   [0690] i. N16 does not comprise a 2′-OMe modification; and/or
   [0691] j. N17 does not comprise a 2′-OMe modification.
[0692] Embodiment 275 is the gRNA of any one of embodiments 205-274, wherein:
   [0693] a. H1-2 does not comprise a phosphorothioate linkage;
   [0694] b. H1-3 does not comprise a phosphorothioate linkage;
   [0695] c. H1-4 does not comprise a phosphorothioate linkage;
   [0696] d. H1-5 does not comprise a phosphorothioate linkage;
   [0697] e. H1-6 does not comprise a phosphorothioate linkage;
   [0698] f. H1-7 does not comprise a phosphorothioate linkage;
   [0699] g. H1-8 does not comprise a phosphorothioate linkage;
   [0700] h. H1-9 does not comprise a phosphorothioate linkage;
   [0701] i. H1-10 does not comprise a phosphorothioate linkage;
   [0702] j. H2-1 does not comprise a phosphorothioate linkage;
   [0703] k. H2-2 does not comprise a phosphorothioate linkage;
   [0704] l. H2-3 does not comprise a phosphorothioate linkage;
   [0705] m. H2-4 does not comprise a phosphorothioate linkage;
   [0706] n. H2-5 does not comprise a phosphorothioate linkage;
   [0707] o. H2-6 does not comprise a phosphorothioate linkage;
   [0708] p. H2-7 does not comprise a phosphorothioate linkage;
   [0709] q. H2-8 does not comprise a phosphorothioate linkage;
   [0710] r. H2-9 does not comprise a phosphorothioate linkage;
   [0711] s. H2-10 does not comprise a phosphorothioate linkage;
   [0712] t. H2-11 does not comprise a phosphorothioate linkage;
   [0713] u. H2-12 does not comprise a phosphorothioate linkage;
   [0714] v. H2-13 does not comprise a phosphorothioate linkage;
   [0715] w. H2-14 does not comprise a phosphorothioate linkage; and/or
   [0716] x. H2-15 does not comprise a phosphorothioate linkage.
[0717] Embodiment 276 is a gRNA which is an sgRNA comprising modifications at:
   [0718] a. nucleotides 6-10 from the 5′ end of the 5′ terminus, which are optionally PS modifications;
   [0719] b. nucleotides 8-11, 13, 14, 17, and 18 from the 5′ end of the 5′ terminus, which are optionally 2′-fluoro modifications; and
   [0720] c. H1-1 and H2-1, which are optionally 2′-OMe modifications, or conserved region YA site 1 or 8.
[0721] Embodiment 277 is a gRNA which is an sgRNA comprising YA modifications at:
   [0722] a. conserved region YA sites 1, 5, 6, 7, and 9, which are optionally 2′-OMe modifications; and
   [0723] b. conserved region YA site 8, which is optionally a 2′-fluoro modification.
[0724] Embodiment 278 is a gRNA comprising YA modifications at four guide region YA sites, wherein at least one of the YA sites is at or after nucleotide 8 from the 5′ end of the 5′ terminus, and wherein:
   [0725] a. the first YA site comprises a 2′-OMe modification;
   [0726] b. the second YA site comprises a 2′-fluoro modification;
   [0727] c. the third YA site comprises a 2′-fluoro or PS modification; and
   [0728] d. the fourth YA site comprises a PS modification,
      optionally wherein the first, second, third, and fourth YA sites are arranged in the 5′ to 3′ direction.
[0729] Embodiment 279 is the gRNA of embodiment 278, wherein the third YA site comprises a PS modification.
[0730] Embodiment 280 is the gRNA of any one of embodiments 278-279, wherein the third YA site comprises a 2′-fluoro modification.
[0731] Embodiment 281 is the gRNA of any one of embodiments 278-280, further comprising a fifth YA site comprising a PS modification, which is optionally 3′ of the fourth YA site.
[0732] Embodiment 282 is the gRNA of any one of the embodiments 205-281, wherein conserved region YA sites 1, 5, 6, 7, and 9 comprise YA modifications, which are optionally 2′-OMe modifications; and conserved region YA site 8 comprises a modification, which is optionally a 2′-fluoro modification.
[0733] Embodiment 283 is a gRNA which is an sgRNA comprising YA modifications at:
   [0734] a. nucleotide 4 from the 5′ end of the 5′ terminus, wherein the YA modification is optionally a 2′-OMe modification;
   [0735] b. nucleotides 6-10 from the 5′ end of the 5′ terminus, which are optionally PS modifications;
   [0736] c. nucleotides 8-11, 13, 14, 17, and 18 from the 5′ end of the 5′ terminus, which are optionally 2′-fluoro modifications;
   [0737] d. LS5, LS7, LS9, and LS11, which are optionally 2′-fluoro modifications;
   [0738] e. LS8, LS10, and LS12, which are optionally 2′-OMe modifications;
   [0739] f. N2, N3, N4, N5, N6, N7, N10, N11, N16, and N17, which are optionally 2′-OMe modifications; and
   [0740] g. N14, which is optionally a 2′-fluoro modification.
[0741] Embodiment 284 is the gRNA of any one of embodiment 161-, wherein one or more of the following are true:
   [0742] a. nucleotide 4 from the 5′ end of the 5′ terminus comprises a 2′-OMe modification;
   [0743] b. nucleotides 6-10 from the 5′ end of the 5′ terminus comprise PS modifications;
   [0744] c. nucleotides 8-11, 13, 14, 17, and 18 from the 5′ end of the 5′ terminus comprise 2′-fluoro modifications;
   [0745] d. LS5, LS7, LS9, and LS11 comprise 2′-fluoro modifications;
   [0746] e. LS8, LS10, and LS12 comprise 2′-OMe modifications;
   [0747] f. N2, N3, N4, N5, N6, N7, N10, N11, N16, and N17 comprise 2′-OMe modifications; and
   [0748] g. N14 comprises a 2′-fluoro modification.
[0749] Embodiment 285 is the gRNA of any one of embodiments 161-284, wherein at least one YA modification comprises a modification of the pyrimidine position of the YA site.
[0750] Embodiment 286 is the gRNA of any one of embodiments 161-285, wherein at least one YA modification comprises a modification of the adenine position of the YA site.
[0751] Embodiment 287 is the gRNA of any one of embodiments 161-286, wherein at least 2, 3, 4, 5, 6, 7, 8, 9, or 10 YA sites comprise YA modifications at the pyrimidines positions of the YA sites.
[0752] Embodiment 288 is the gRNA of any one of embodiments 161-287, wherein at least 2, 3, 4, 5, 6, 7, 8, 9, or 10 YA sites comprise YA modifications at the adenine positions of the YA sites.
[0753] Embodiment 289 is the gRNA of any one of embodiments 161-288, wherein at least one YA modification comprises a 2′-OMe modification.
[0754] Embodiment 290 is the gRNA of any one of embodiments 161-289, wherein at least 2, 3, 4, 5, 6, 7, 8, 9, or 10 YA sites comprise a 2′-OMe modification.
[0755] Embodiment 291 is the gRNA of any one of embodiments 161-290, wherein each modified conserved region YA site comprises a modification at the pyrimidine position of the YA site.
[0756] Embodiment 292 is the gRNA of any one of embodiments 161-291, wherein each modified guide region YA site, or each modified conserved region and guide region YA site, comprises a modification at the pyrimidine position of the YA site.
[0757] Embodiment 293 is the gRNA of any one of embodiments 161-292, wherein each modified conserved region YA site comprises a modification at the adenine position of the YA site.
[0758] Embodiment 294 is the gRNA of any one of embodiments 161-293, wherein each modified guide region YA site, or each modified conserved region and guide region YA site, comprises a modification at the adenine position of the YA site.
[0759] Embodiment 295 is the gRNA of any one of embodiments 161-294, which is an sgRNA comprising a modification at LS5.
[0760] Embodiment 296 is the gRNA of any one of embodiments 161-295, which is an sgRNA comprising a modification at LS7.
[0761] Embodiment 297 is the gRNA of any one of embodiments 161-296, which is an sgRNA comprising a modification at LS9, optionally wherein if LS9 is modified and LS5, LS7, and LS12 are not, then the modification of LS9 is other than 2′-fluoro.
[0762] Embodiment 298 is the gRNA of any one of embodiments 161-297, which is an sgRNA comprising a modification at LS12, optionally wherein if LS12 is modified and LS9 is not, then the modification of LS12 is other than 2′-OMe.
[0763] Embodiment 299 is the gRNA of any one of embodiments 161-298, which is an sgRNA comprising at least one YA modification that stabilizes a secondary structure, optionally wherein the secondary structure is the lower stem.
[0764] Embodiment 300 is the gRNA of any one of embodiments 161-299, which is an sgRNA comprising at least one modification of LS8 and/or LS11, optionally wherein the modification of LS8 and/or LS11 stabilizes a secondary structure.
[0765] Embodiment 301 is the gRNA of any one of embodiments 161-300, comprising a YA modification that stabilizes a secondary structure chosen from:
   [0766] a. ENA;
   [0767] b. LNA; or
   [0768] c. a bicyclic ribose modification.
[0769] Embodiment 302 is the gRNA of any one of embodiments 161-301, which is an sgRNA comprising a modification at N6.
[0770] Embodiment 303 is the gRNA of any one of embodiments 161-302, which is an sgRNA comprising a modification at N14.
[0771] Embodiment 304 is the gRNA of any one of embodiments 161-303, which is an sgRNA comprising a modification at N17, optionally wherein if N17 is modified and N6 and N14 are not, then the modification of N17 is other than 2′-fluoro and other than 2′-OMe.
[0772] Embodiment 305 is the gRNA of any one of embodiments 161-304, wherein at least 1, 2, or 3 of nucleotides 1-3 from the 5′ end of the 5′ terminus comprise deoxyribonucleotides, optionally wherein nucleotides 1-3 from the 5′ end of the 5′ terminus comprise PS modifications.
[0773] Embodiment 306 is the gRNA of any one of embodiments 161-305, wherein the gRNA is an sgRNA and at least 1, 2, or 3 of nucleotides 1-3 from the 3′ end of the 3′ terminus comprise deoxyribonucleotides, optionally wherein nucleotides 2-3 from the 3′ end of the 3′ terminus comprise PS modifications.
[0774] Embodiment 307 is the gRNA of any one of embodiments 161-306, wherein the gRNA is an sgRNA and nucleotide 4 from the 3′ end of the 3′ terminus comprises a PS modification, optionally wherein nucleotide 4 from the 3′ end of the 3′ terminus comprises a 2′-OMe modification.
[0775] Embodiment 308 is the gRNA of any one of embodiments 161-307, wherein the gRNA is an sgRNA and hairpin 2 comprises deoxyribonucleotides, optionally wherein all or all but 1, 2, 3, 4, 5, 6, 7, 8, 9, or 10 nucleotides of hairpin 1 and hairpin 2 are deoxyribonucleotides.
[0776] Embodiment 309 is the gRNA of any one of embodiments 161-308, wherein the gRNA is an sgRNA and hairpin 1 and hairpin 2 comprise deoxyribonucleotides, optionally wherein all or all but 1, 2, 3, 4, 5, 6, 7, 8, 9, 10, 11, 12, or 13 nucleotides of hairpin 1 and hairpin 2 are deoxyribonucleotides.
[0777] Embodiment 310 is the gRNA of any one of embodiments 161-309, wherein the gRNA is an sgRNA and all or all but 1, 2, 3, 4, 5, 6, 7, 8, 9, 10, 11, 12, or 13 nucleotides from the beginning of hairpin 1 to the 3′ end of the sgRNA are deoxyribonucleotides, optionally wherein nucleotides 1-3 from the 3′ end of the 3′ terminus are deoxyribonucleotides.
[0778] Embodiment 311 is the gRNA of any one of embodiments 161-310, wherein the gRNA is an sgRNA and the upper stem comprises deoxyribonucleotides.
[0779] Embodiment 312 is the gRNA of any one of embodiments 161-311, wherein the gRNA is an sgRNA and all or all but 1, 2, 3, 4, 5, 6, 7, 8, 9, or 10 nucleotides of the upper stem are deoxyribonucleotides.
[0780] Embodiment 313 is the gRNA of any one of embodiments 161-312, wherein at least 1, 2, or 3 of nucleotides 1-3 from the 5′ end of the 5′ terminus comprise ENA, optionally wherein nucleotides 1-3 from the 5′ end of the 5′ terminus comprise PS modifications.
[0781] Embodiment 314 is the gRNA of any one of embodiments 161-313, wherein the gRNA is an sgRNA and at least 1, 2, or 3 of nucleotides 2-4 from the 3′ end of the 3′ terminus comprise ENA, optionally wherein nucleotides 2-3 from the 3′ end of the 3′ terminus comprise PS modifications.
[0782] Embodiment 315 is the gRNA of any one of embodiments 161-314, wherein at least 1, 2, or 3 of nucleotides 1-3 from the 5′ end of the 5′ terminus comprise UNA, optionally wherein nucleotides 1-3 from the 5′ end of the 5′ terminus comprise PS modifications.
[0783] Embodiment 316 is the gRNA of any one of embodiments 161-315, wherein the gRNA is an sgRNA and at least 1, 2, or 3 of nucleotides 2-4 from the 3′ end of the 3′ terminus comprise UNA, optionally wherein nucleotides 2-3 from the 3′ end of the 3′ terminus comprise PS modifications.
[0784] Embodiment 317 is the gRNA of any one of embodiments 161-316, wherein the gRNA is an sgRNA and nucleotide 4 from the 3′ end of the 3′ terminus comprises a PS modification, optionally wherein nucleotide 4 from the 3′ end of the 3′ terminus comprises a 2′-OMe modification.
[0785] Embodiment 318 is the gRNA of any one embodiments 161-317, wherein the gRNA is an sgRNA that comprises a 3′ end modification.
[0786] Embodiment 319 is the gRNA of any one of embodiments 161-318, which is an sgRNA comprising a 3′ end modification, wherein the 3′ end modification is a protective 3′ end modification.
[0787] Embodiment 320 is the gRNA of any one embodiments 161-319, wherein the gRNA is an sgRNA that comprises a 3′ tail.
[0788] Embodiment 321 is the gRNA of embodiment 320, wherein the 3′ tail comprises 1, 2, 3, 4, 5, 6, 7, 8, 9, or 10 nucleotides.
[0789] Embodiment 322 is the gRNA of embodiment 320, wherein the 3′ tail comprises about 1-2, 1-3, 1-4, 1-5, 1-7, 1-10, at least 1-5, at least 1-3, at least 1-4, at least 1-5, at least 1-5, at least 1-7, or at least 1-10 nucleotides.
[0790] Embodiment 323 is the gRNA of any one of embodiments 161-322, which is an sgRNA comprising a modification in the hairpin region.
[0791] Embodiment 324 is the gRNA of any one of embodiments 161-323, which is an sgRNA comprising a 3′ end modification, and a modification in the hairpin region.
[0792] Embodiment 325 is the gRNA of embodiment 323 or 324, wherein the modification in the hairpin region comprises a modified nucleotide selected from 2′-O-methyl (2′-O-Me) modified nucleotide, a 2′-fluoro (2′-F) modified nucleotide, or combinations thereof.
[0793] Embodiment 326 is the gRNA of any one of embodiments 323-325, wherein the modification in the hairpin region comprises or further comprises a 2′-O-methyl (2′-O-Me) modified nucleotide.
[0794] Embodiment 327 is the gRNA of any one of embodiments 323-326, wherein the modification in the hairpin region comprises or further comprises a 2′-fluoro (2′-F) modified nucleotide.
[0795] Embodiment 328 is the gRNA of any one of embodiments 161-327, comprising 3′ and/or 5′ protective end modification(s).
[0796] Embodiment 329 is the gRNA of embodiment 328, wherein the 3′ and/or 5′ end modification comprises a modified nucleotide selected from 2′-O-methyl (2′-O-Me) modified nucleotide, 2′-O-(2-methoxyethyl) (2′-O-moe) modified nucleotide, a 2′-fluoro (2′-F) modified nucleotide, a phosphorothioate (PS) linkage between nucleotides, an inverted abasic modified nucleotide, or combinations thereof.
[0797] Embodiment 330 is the gRNA of embodiment 328 or 329, wherein the 3′ and/or 5′ end modification comprises or further comprises a 2′-O-methyl (2′-O-Me) modified nucleotide.
[0798] Embodiment 331 is the gRNA of embodiment 328 or 329, wherein the 3′ and/or 5′ end modification comprises or further comprises a 2′-fluoro (2′-F) modified nucleotide.
[0799] Embodiment 332 is the gRNA of embodiment 328 or 329, wherein the 3′ and/or 5′ end modification comprises or further comprises a phosphorothioate (PS) linkage between nucleotides.
[0800] Embodiment 333 is the gRNA of embodiment 328 or 329, wherein the 3′ and/or 5′ end modification comprises or further comprises an inverted abasic modified nucleotide.
[0801] Embodiment 334 is the gRNA of any one any one of embodiments 161-333, wherein the gRNA is an sgRNA and if the sgRNA comprises a 3′ end modification, the 3′ end modification comprises any one or more of the following:
   [0802] i. a modification of any one or more of the last 7, 6, 5, 4, 3, 2, or 1 nucleotides;
   [0803] ii. one modified nucleotide;
   [0804] iii. two modified nucleotides;
   [0805] iv. three modified nucleotides;
   [0806] v. four modified nucleotides;
   [0807] vi. five modified nucleotides;
   [0808] vii. six modified nucleotides; and
   [0809] viii. seven modified nucleotides.
[0810] Embodiment 335 is the gRNA of embodiment 334, wherein the 3′ end modification comprises a modification of between 1 and 7, between 1 and 5, between 1 and 4, or between 2 and 4 nucleotides.
[0811] Embodiment 336 is the gRNA of any one of embodiments 161-335, wherein the gRNA is an sgRNA comprising a 3′ end modification and the 3′ end modification comprises one or more of the following:
   [0812] i. a phosphorothioate (PS) linkage between nucleotides;
   [0813] ii. a 2′-O-Me modified nucleotide;
   [0814] iii. a 2′-O-moe modified nucleotide;
   [0815] iv. a 2′-F modified nucleotide;
   [0816] v. an inverted abasic modified nucleotide
   [0817] vi. ENA, UNA, and/or DNA; and
   [0818] vii. or a combination thereof.
[0819] Embodiment 337 is the gRNA of any one of embodiments 161-336, wherein the gRNA is an sgRNA comprising a 3′ tail, and the 3′ tail comprises any one or more of:
   [0820] i. a phosphorothioate (PS) linkage between nucleotides;
   [0821] ii. a 2′-O-Me modified nucleotide;
   [0822] iii. a 2′-O-moe modified nucleotide;
   [0823] iv. a 2′-F modified nucleotide;
   [0824] v. an inverted abasic modified nucleotide
   [0825] vi. ENA, UNA, and/or DNA; and
   [0826] vii. or a combination thereof.
[0827] Embodiment 338 is the gRNA of embodiment 336, wherein the 3′ end modification comprises:
   [0828] i. 1, 2, 3, 4, 5, 6, or 7 PS linkages between nucleotides;
   [0829] ii. about 1-3, 1-5, 1-6, or 1-7 PS linkages between nucleotides; or
   [0830] iii. PS linkages between each nucleotide.
[0831] Embodiment 339 is the gRNA of any one of embodiments embodiment 326-328, wherein the 3′ end modification further comprises at least one 2′-O-Me, 2′-O-moe, inverted abasic, or 2′-F modified nucleotide.
[0832] Embodiment 340 is the gRNA of any one of embodiments 326-329, wherein the 3′ end modification comprises at least one PS linkage, and wherein:
   [0833] i. there is one PS linkage, and the linkage is between the last and second to last nucleotide;
   [0834] ii. there are two PS linkages between the last three nucleotides;
   [0835] iii. there are PS linkages between any one or more of the last four nucleotides;
   [0836] iv. there are PS linkages between any one or more of the last five nucleotides; or
   [0837] v. there are PS linkages between any one or more of the last 2, 3, 4, 5, 6, 7, 8, 9, or 10 nucleotides.
[0838] Embodiment 341 is the gRNA of any one of embodiments 336-340, wherein the 3′ end modification comprises:
   [0839] i. a modification of one or more of the last 1-7 nucleotides, wherein the modification is a PS linkage, inverted abasic nucleotide, 2′-O-Me, 2′-O-moe, 2′-F, or combinations thereof;
   [0840] ii. a modification to the last nucleotide with 2′-O-Me, 2′-O-moe, 2′-F, or combinations thereof, and an optional one or two PS linkages to the next nucleotide and/or the first nucleotide of the 3′ tail;
   [0841] iii. a modification to the last and/or second to last nucleotide with 2′-O-Me, 2′-O-moe, 2′-F, or combinations thereof, and optionally one or more PS linkages;
   [0842] iv. a modification to the last, second to last, and/or third to last nucleotides with 2′-O-Me, 2′-O-moe, 2′-F, or combinations thereof, and optionally one or more PS linkages;
   [0843] v. a modification to the last, second to last, third to last, and/or fourth to last nucleotides with 2′-O-Me, 2′-O-moe, 2′-F, or combinations thereof, and optionally one or more PS linkages; or
   [0844] vi. a modification to the last, second to last, third to last, fourth to last, and/or fifth to last nucleotides with 2′-O-Me, 2′-O-moe, 2′-F, or combinations thereof, and optionally one or more PS linkages.
[0845] Embodiment 342 is the gRNA of any one of embodiments 161-341, wherein the gRNA is an sgRNA comprising a 3′ tail, wherein the 3′ tail comprises a modification of any one or more of the nucleotides present in the 3′ tail.
[0846] Embodiment 343 is the gRNA of embodiment 342, wherein the 3′ tail is fully modified.
[0847] Embodiment 344 is the gRNA of embodiment 342, wherein the 3′ tail comprises 1, 2, 3, 4, 5, 6, 7, 8, 9, 10, 1-2, 1-3, 1-4, 1-5, 1-6, 1-7, 1-8, 1-9, or 1-10 nucleotides, optionally where any one or more of these nucleotides are modified.
[0848] Embodiment 345 is the gRNA of any one of embodiments 336-344, wherein the 3′ end modification comprises any one or more of the following:
   [0849] i. the 3′ end modification as shown in any one of SEQ ID Nos: 401-532;
   [0850] ii. (i) a 2′O-Me modified nucleotide at the last nucleotide of the conserved region of an sgRNA or short-sgRNA, (ii) three consecutive 2′O-moe modified nucleotides immediately 5′ to the 2′O-Me modified nucleotide, and (iii) three consecutive PS linkages between the last three nucleotides;
   [0851] iii. (i) five consecutive 2′O-Me modified nucleotides from the 3′ end of the 3′ terminus, and (ii) three PS linkages between the last three nucleotides;
   [0852] iv. an inverted abasic modified nucleotide at the last nucleotide of the conserved region of an sgRNA or short-sgRNA;
   [0853] v. (i) an inverted abasic modified nucleotide at the last nucleotide of the conserved region of an sgRNA or short-sgRNA, and (ii) three consecutive 2′O-Me modified nucleotides at the last three nucleotides of the conserved region of an sgRNA or short-sgRNA;
   [0854] vi. (i) 15 consecutive 2′O-Me modified nucleotides from the 3′ end of the 3′ terminus, (ii) five consecutive 2′-F modified nucleotides immediately 5′ to the 2′O-Me modified nucleotides, and (iii) three PS linkages between the last three nucleotides;
   [0855] vii. (i) alternating 2′O-Me modified nucleotides and 2′-F modified nucleotides at the last 20 nucleotides of the conserved region of an sgRNA or short-sgRNA, and (ii) three PS linkages between the last three nucleotides;
   [0856] viii. (i) two or three consecutive 2′O-Me modified nucleotides, and (ii) three PS linkages between the last three nucleotides;
   [0857] ix. one PS linkage between the last and next to last nucleotides; and
   [0858] x. 15 or 20 consecutive 2′O-Me modified nucleotides, and (ii) three PS linkages between the last three nucleotides.
[0859] Embodiment 346 is the gRNA of any one of embodiments 161-345, comprising a 5′ end modification comprising any one or more of the following:
   [0860] i. a modification of any one or more of nucleotides 1-7 of the guide region;
   [0861] ii. one modified nucleotide;
   [0862] iii. two modified nucleotides;
   [0863] iv. three modified nucleotides;
   [0864] v. four modified nucleotides;
   [0865] vi. five modified nucleotides;
   [0866] vii. six modified nucleotides; and
   [0867] viii. seven modified nucleotides.
[0868] Embodiment 347 is the gRNA of any one of embodiments 161-346, comprising a 5′ end modification, wherein the 5′ end modification is a protective 5′ end modification.
[0869] Embodiment 348 is the gRNA of any one of embodiments 161-347, comprising a 5′ end modification, wherein the 5′ end modification comprises a modification of between 1 and 7, between 1 and 5, between 1 and 4, between 1 and 3, or between 1 and 2 nucleotides.
[0870] Embodiment 349 is the gRNA of any one of embodiments 161-348, comprising a 5′ end modification wherein the 5′ end modification comprises any one or more of the following:
   [0871] i. modifications of 1, 2, 3, 4, 5, 6, or 7 of the first 7 nucleotides;
   [0872] ii. modifications of about 1-3, 1-4, 1-5, 1-6, or 1-7 of the first 7 nucleotides; and
   [0873] iii. modifications at the first, second, third, fourth, fifth, sixth, and/or seventh nucleotide at the 5′ end, optionally wherein the modifications are consecutive.
[0874] Embodiment 350 is the gRNA of any one of embodiments 161-349, comprising a 5′ end modification, wherein the 5′ end modification comprises one or more of:
   [0875] i. a phosphorothioate (PS) linkage between nucleotides;
   [0876] ii. a 2′-O-Me modified nucleotide;
   [0877] iii. a 2′-O-moe modified nucleotide;
   [0878] iv. a 2′-F modified nucleotide;
   [0879] v. an inverted abasic modified nucleotide
   [0880] vi. ENA, UNA, and/or DNA; and
   [0881] vii. combinations thereof.
[0882] Embodiment 351 is the gRNA any one of embodiments 161-350, comprising a 5′ end modification wherein the 5′ end modification comprises:
   [0883] i. 1, 2, 3, 4, 5, 6, and/or 7 PS linkages between nucleotides; or
   [0884] ii. about 1-2, 1-3, 1-4, 1-5, 1-6, or 1-7 PS linkages between nucleotides.
[0885] Embodiment 352 is the gRNA of any one of embodiments 161-351, wherein the sgRNA comprises a 5′ end modification and the 5′ end modification comprises at least one 2′-O-Me, 2′-O-moe, inverted abasic, 2′-H, inosine, or 2′-F modified nucleotide.
[0886] Embodiment 353 is the gRNA of embodiment 352, wherein the 5′ end modification comprises at least one PS linkage, and wherein:
   [0887] i. there is one PS linkage, and the linkage is at nucleotide 1 of the guide region;
   [0888] ii. there are two PS linkages, and the linkages are at nucleotides 1 and 2 of the guide region;
   [0889] iii. there are PS linkages at any one or more of nucleotides 1, 2, and 3 of the guide region;
   [0890] iv. there are PS linkages at any one or more of nucleotides 1, 2, 3, and 4 of the guide region;
   [0891] v. there are PS linkages at any one or more of nucleotides 1, 2, 3, 4, and 5 of the guide region;
   [0892] vi. there are PS linkages at any one or more of nucleotides 1, 2, 3, 4, 5, and 6 of the guide region; or
   [0893] vii. there are PS linkages at any one or more of nucleotides 1, 2, 3, 4, 5, 6, and 7 of the guide region.
[0894] Embodiment 354 is the gRNA of any one of embodiments 352-353, wherein the 5′ end modification comprises:
   [0895] i. a modification of one or more of nucleotides 1-7 of the variable region, wherein the modification is a PS linkage, inverted abasic nucleotide, 2′-O-Me, 2′-O-moe, 2′-F, 2′-H, inosine, and/or combinations thereof;
   [0896] ii. a modification to the first nucleotide of the guide region with 2′-O-Me, 2′-O-moe, 2′-F, 2′-H, inosine, or combinations thereof, and an optional PS linkage to the next nucleotide;
   [0897] iii. a modification to the first and/or second nucleotide of the variable region with 2′-O-Me, 2′-O-moe, 2′-F, 2′-H, inosine, or combinations thereof, and optionally one or more PS linkages;
   [0898] iv. a modification to the first, second, and/or third nucleotides of the variable region with 2′-O-Me, 2′-O-moe, 2′-F, 2′-H, inosine, or combinations thereof, and optionally one or more PS linkages;
   [0899] v. a modification to the first, second, third, and/or fourth nucleotides of the variable region with 2′-O-Me, 2′-O-moe, 2′-F, 2′-H, inosine, or combinations thereof, and optionally one or more PS linkages; or
   [0900] vi. a modification to the first, second, third, fourth, and/or fifth nucleotides of the variable region with 2′-O-Me, 2′-O-moe, 2′-F, 2′-H, inosine, or combinations thereof, and optionally one or more PS linkages.
[0901] Embodiment 355 is the gRNA of any one of embodiments 161-354, comprising a 5′ end modification, wherein the 5′ end modification comprises any one or more of the following:
   [0902] i. a 5′ end modification as shown in any one of SEQ ID Nos: 1-54, 401-532, 1001, 1007-1132, 1205-1212, 1322-1406, 1417-1501, 1511-1596, 3018-3059, 3063-3104, 3108-3149, 3153-3194, 3198-3239, 3243-3284, 3295-3341, 3343-3385, 3388-3430, or 3549-3552;
   [0903] ii. 2′-OMe modified nucleotides at nucleotides 1, 2, and 3 of the guide region;
   [0904] iii. 2′-OMe modified nucleotides at nucleotides 1, 2, and 3 of the guide region and PS linkages between nucleotides 1 and 2, 2 and 3, and 3 and 4 of the guide region;
   [0905] iv. 2′-OMe modified nucleotides at nucleotides 1, 2, 3, 4, and 5 of the guide region;
   [0906] v. 2′-OMe modified nucleotides at nucleotides 1, 2, 3, 4, and 5 of the guide region and PS linkages between nucleotides 1 and 2, 2 and 3, 3 and 4, 4 and 5, and 5 and 6 of the guide region;
   [0907] vi. 2′O-moe modified nucleotides at nucleotides 1, 2, and 3 of the guide region;
   [0908] vii. 2′O-moe modified nucleotides at nucleotides 1, 2, and 3 of the guide region and PS linkages between nucleotides 1 and 2, 2 and 3, and 3 and 4 of the guide region;
   [0909] viii. an inverted abasic modified nucleotide at nucleotide 1 of the guide region;
   [0910] ix. an inverted abasic modified nucleotide at nucleotide 1 of the guide region and 2′-OMe modified nucleotides at nucleotides 1, 2, and 3 of the guide region; and
   [0911] x. an inverted abasic modified nucleotide at nucleotide 1 of the guide region, 2′-OMe modified nucleotides at nucleotides 1, 2, and 3 of the guide region, and PS linkages between nucleotides 1 and 2, 2 and 3, 3 and 4, 4 and 5, and 5 and 6 of the variable region.
[0912] Embodiment 356 is the gRNA of any one of embodiments 161-355, wherein the gRNA is an sgRNA and the upper stem region comprises at least one modification.
[0913] Embodiment 357 is the gRNA of embodiment 346, wherein the upper stem modification comprises any one or more of the following:
   [0914] i. a modification to any one or more of US1-US12 in the upper stem region;
   [0915] ii. a modification of at least 1, 2, 3, 4, 5, 6, 7, 8, 9, 10, 11, or all 12 nucleotides in the upper stem region; and
   [0916] iii. a modification of about 1-2, 1-3, 1-4, 1-5, 1-6, 1-7, 1-8, 1-9, 1-10, or 1-12 nucleotides in the upper stem region.
[0917] Embodiment 358 is the gRNA of any one of embodiments 356-357, wherein the upper stem modification comprises one or more of:
   [0918] i. a 2′-O-Me modified nucleotide;
   [0919] ii. a 2′-H modified nucleotide;
   [0920] iii. a 2′-F modified nucleotide; and
   [0921] iv. combinations thereof.
[0922] Embodiment 359 is the gRNA of any one of embodiments 161-358, wherein the gRNA is an sgRNA comprising one or more modifications in the hairpin 1 region.
[0923] Embodiment 360 is the gRNA of embodiment 359 wherein the sgRNA comprises a modification at H1-1.
[0924] Embodiment 361 is the gRNA of any one of embodiments 161-360, wherein the gRNA is an sgRNA comprising one or more modifications in the hairpin 2 region.
[0925] Embodiment 362 is the gRNA of embodiment 361, wherein the sgRNA comprises a modification at H2-1.
[0926] Embodiment 363 is the gRNA of any one of embodiments 161-362, wherein the gRNA is an sgRNA comprising comprises modifications at H1-1 to H1-12.
[0927] Embodiment 364 is the gRNA of any one of embodiments 161-363, wherein the gRNA is an sgRNA comprising comprises modifications at H2-1 to H2-15.
[0928] Embodiment 365 is the gRNA of any one of embodiments 161-364, wherein the gRNA is an sgRNA comprising one or more modifications in each of the upper stem region, the hairpin 1 region, and the hairpin 2 region.
[0929] Embodiment 366 is the gRNA of any one of embodiments 161-365, wherein the gRNA is an sgRNA comprising a modified nucleotide between hairpin 1 and hairpin 2 regions.
[0930] Embodiment 367 is the gRNA of any one of embodiments 161-366, which is an sgRNA further comprising a lower stem region comprising a modification.
[0931] Embodiment 368 is the gRNA of any one of embodiments 161-367, further comprising a 3′ end modification.
[0932] Embodiment 369 is the gRNA of embodiment 368, wherein at least two of the last four nucleotides at the 3′ end of the 3′ terminus are modified.
[0933] Embodiment 370 is the gRNA of embodiment 369, wherein at least two of the last four nucleotides at the 3′ end of the 3′ terminus are modified with 2′-O-Me, 2′-F, or 2′-O-moe.
[0934] Embodiment 371 is the gRNA of any one of embodiments 368-370, further comprising phosphorothioate (PS) bonds between one or more of the last four nucleotides at the 3′ end of the 3′ terminus.
[0935] Embodiment 372 is the gRNA of any one of embodiments 161-371, which is an sgRNA further comprising a bulge region comprising a modification.
[0936] Embodiment 373 is the gRNA of any one of embodiments 161-372, which is an sgRNA further comprising a nexus region comprising a modification.
[0937] Embodiment 374 is an sgRNA comprising any of SEQ ID Nos: 401-535, 601, 607-732, 801, 807-932, 1001, or 1007-1132, including the modifications of Table 1.
[0938] Embodiment 375 is an sgRNA comprising nucleic acids having at least 99, 98, 97, 96, 95, 94, 93, 92, 91, 90, 85, 80, 75, or 70% identity to the nucleic acids of any one of SEQ ID Nos: 401-535, 601, 607-732, 801, 807-932, 1001, or 1007-1132, wherein the modification at each nucleotide of the sgRNA that corresponds to a nucleotide of the reference sequence identifier in Table 1, is identical to or equivalent to the modification shown in the reference sequence identifier in Table 1.
[0939] Embodiment 376 is the gRNA of any one of embodiments 161-375, wherein the modification reduces gRNA degradation without significantly altering the ability of the guide to cleave a target nucleic acid.
[0940] Embodiment 377 is the gRNA of any one of embodiments 161-376, comprising a YA modification wherein the modification comprises 2′-fluoro, 2′-H, 2′-O-Me, ENA, UNA, or PS.
[0941] Embodiment 378 is the gRNA of any one of embodiments 161-377, comprising a YA modification wherein the modification alters the structure of the dinucleotide motif to reduce RNA endonuclease activity.
[0942] Embodiment 379 is the gRNA of any one of embodiments 161-378, comprising a YA modification wherein the modification interferes with recognition or cleavage of a YA site by an RNase and/or stabilizes an RNA structure.
[0943] Embodiment 380 is the gRNA of any one of embodiments 161-379, comprising a YA modification wherein the modification comprises one or more of:
   [0944] a. a ribose modification selected from 2′-O-alkyl, 2′-F, 2′-moe, 2′-F arabinose, and 2′-H (deoxyribose);
   [0945] b. a bicyclic ribose analog, such as LNA, BNA, and ENA;
   [0946] c. an unlocked nucleic acid modification;
   [0947] d. a base modification, such as inosine, pseudouridine, and 5′-methylcytosine; and
   [0948] e. an internucleoside linkage modification such as phosphorothioate.
[0949] Embodiment 381 is the gRNA of any one of the preceding embodiments, wherein the gRNA comprises a guide region that comprises a modification at nucleotide 5, optionally wherein the guide region comprises 2′-OMe modifications at nucleotides 1-4, phosphorothioate modifications at nucleotides 1-3 and 6-10, and/or 2′-F modifications at nucleotides 8-11, 13, 14, 17, and 18.
[0950] Embodiment 382 is the gRNA of any one of the preceding embodiments, wherein the gRNA comprises a guide region that comprises a modification at nucleotide 12, optionally wherein the guide region comprises 2′-OMe modifications at nucleotides 1-4, phosphorothioate modifications at nucleotides 1-3 and 6-10, and/or 2′-F modifications at nucleotides 8-11, 13, 14, 17, and 18.
[0951] Embodiment 383 is the gRNA of any one of the preceding embodiments, wherein the gRNA comprises a guide region that comprises a 2′-OMe modification at nucleotide 5 and/or nucleotide 12, optionally wherein the guide region comprises 2′-OMe modifications at nucleotides 1-4, phosphorothioate modifications at nucleotides 1-3 and 6-10, and/or 2′-F modifications at nucleotides 8-11, 13, 14, 17, and 18.
[0952] Embodiment 384 is the gRNA of any one of the preceding embodiments, wherein the gRNA comprises a guide region that comprises a 2′-F modification at nucleotide 5 and/or nucleotide 12, optionally wherein the guide region comprises 2′-OMe modifications at nucleotides 1-4, phosphorothioate modifications at nucleotides 1-3 and 6-10, and/or 2′-F modifications at nucleotides 8-11, 13, 14, 17, and 18.
[0953] Embodiment 385 is the gRNA of any one of the preceding embodiments, wherein the gRNA comprises a guide region that comprises a 2′-H modification at nucleotide 5 and/or nucleotide 12, optionally wherein the guide region comprises 2′-OMe modifications at nucleotides 1-4, phosphorothioate modifications at nucleotides 1-3 and 6-10, and/or 2′-F modifications at nucleotides 8-11, 13, 14, 17, and 18.
[0954] Embodiment 386 is the gRNA of any one of the preceding embodiments, wherein the gRNA comprises a guide region that comprises a phosphorothioate modification at nucleotide 5 and/or nucleotide 12, optionally wherein the guide region comprises 2′-OMe modifications at nucleotides 1-4, phosphorothioate modifications at nucleotides 1-3 and 6-10, and/or 2′-F modifications at nucleotides 8-11, 13, 14, 17, and 18.
[0955] Embodiment 387 is the gRNA of any one of the preceding embodiments, wherein the gRNA comprises a guide region that comprises modifications at:
   [0956] i. nucleotides 8-10;
   [0957] ii. nucleotides 8 and 9;
   [0958] iii. nucleotides 8 and 10; or
   [0959] iv. nucleotides 9 and 10,
   [0960] optionally wherein the guide region comprises 2′-OMe modifications at nucleotides 1-4, phosphorothioate modifications at nucleotides 1-3 and 6-7, and/or 2′-F modifications at nucleotides 11, 13, 14, 17, and 18.
[0961] Embodiment 388 is the gRNA of any one of the preceding embodiments, wherein the gRNA comprises a guide region that comprises 2′-F modifications at:
   [0962] i. nucleotides 8-10;
   [0963] ii. nucleotides 8 and 9;
   [0964] iii. nucleotides 8 and 10;
   [0965] iv. nucleotides 9 and 10; or
   [0966] v. nucleotide 8;
   [0967] optionally wherein the guide region comprises 2′-OMe modifications at nucleotides 1-4, phosphorothioate modifications at nucleotides 1-3 and 6-7, and/or 2′-F modifications at nucleotides 11, 13, 14, 17, and 18.
[0968] Embodiment 389 is the gRNA of any one of the preceding embodiments, wherein the gRNA comprises a guide region that comprises 2′-F modifications at:
   [0969] i. nucleotides 8-10;
   [0970] ii. nucleotides 8 and 9;
   [0971] iii. nucleotides 8 and 10;
   [0972] iv. nucleotides 9 and 10; or
   [0973] v. nucleotide 8;
   [0974] wherein nucleotides 8-10 do not comprise phosphorothioate modifications, and optionally wherein the guide region comprises 2′-OMe modifications at nucleotides 1-4, phosphorothioate modifications at nucleotides 1-3 and 6-7, and/or 2′-F modifications at nucleotides 11, 13, 14, 17, and 18.
[0975] Embodiment 390 is the gRNA of any one of the preceding embodiments, wherein the gRNA comprises a guide region that comprises 2′-F modifications at nucleotides 8-10 and:
   [0976] i. phosphorothioate modifications at 1, 2, or 3 of nucleotides 8-10;
   [0977] ii. a phosphorothioate modification at nucleotide 8;
   [0978] iii. a phosphorothioate modification at nucleotide 9;
   [0979] iv. a phosphorothioate modification at nucleotide 10;
   [0980] v. a phosphorothioate modification at nucleotides 8 and 9;
   [0981] vi. a phosphorothioate modification at nucleotides 8 and 10;
   [0982] vii. a phosphorothioate modification at nucleotides 9 and 10; or
   [0983] vii. a phosphorothioate modification at nucleotides 8-10
   [0984] optionally wherein the guide region comprises 2′-OMe modifications at nucleotides 1-4, phosphorothioate modifications at nucleotides 1-3 and 6-7, and/or 2′-F modifications at nucleotides 11, 13, 14, 17, and 18.
[0985] Embodiment 391 is the gRNA of any one of the preceding embodiments, wherein the gRNA comprises a guide region that comprises:
   [0986] i. a 2′-F or phosphorothioate modification at nucleotides 5 and 6;
   [0987] ii. a 2′-F modification at nucleotides 5 and 6;
   [0988] iii. a phosphorothioate modification at nucleotides 5 and 6;
   [0989] iv. a 2′-F modification at nucleotide 5 and a phosphorothioate modification at nucleotide 6; or
   [0990] v. a 2′-F modification at nucleotide 6 and a phosphorothioate modification at nucleotide 5;
   [0991] optionally wherein the guide region comprises 2′-OMe modifications at nucleotides 1-4, phosphorothioate modifications at nucleotides 1-3 and 7-10, and/or 2′-F modifications at nucleotides 8-11, 13, 14, 17, and 18.
[0992] Embodiment 392 is the gRNA of any one of the preceding embodiments, wherein the gRNA comprises a guide region that comprises 2′-F modifications at at least 1, 2, 3, 4, 5, or 6 of nucleotides 6-11, optionally wherein the guide region comprises 2′-OMe modifications at nucleotides 1-4, phosphorothioate modifications at nucleotides 1-3, and/or 2′-F modifications at nucleotides 13, 14, 17, and 18.
[0993] Embodiment 393 is the gRNA of any one of the preceding embodiments, wherein the gRNA comprises a guide region that comprises 2′-F modifications at at least 1, 2, 3, 4, 5, 6, 7, 8, 9, or 10 of nucleotides 1-4 and 6-11, optionally wherein the guide region comprises phosphorothioate modifications at nucleotides 1-3 and/or 2′-F modifications at nucleotides 13, 14, 17, and 18.
[0994] Embodiment 394 is the gRNA of any one of the preceding embodiments, wherein the gRNA comprises a guide region that comprises 2′-F modifications at nucleotides 6-11, optionally wherein the guide region comprises 2′-OMe modifications at nucleotides 1-4, phosphorothioate modifications at nucleotides 1-3, and/or 2′-F modifications at nucleotides 13, 14, 17, and 18.
[0995] Embodiment 395 is the gRNA of any one of the preceding embodiments, wherein the gRNA comprises a guide region that comprises 2′-F modifications at nucleotides 1-4, optionally wherein the guide region comprises phosphorothioate modifications at nucleotides 1-3 and 6-10, and/or 2′-F modifications at nucleotides 6-11, 13, 14, 17, and 18.
[0996] Embodiment 396 is the gRNA of any one of the preceding embodiments, wherein the gRNA comprises a guide region that comprises a 2′-F modification at nucleotide 9 and not a phosphorothioate modification at nucleotide 9, optionally wherein the guide region comprises 2′-OMe modifications at nucleotides 1-4, phosphorothioate modifications at nucleotides 1-3 and 6-8 and 10, and/or 2′-F modifications at nucleotides 8, 10, 11, 13, 14, 17, and 18.
[0997] Embodiment 397 is the gRNA of any one of the preceding embodiments, wherein the gRNA comprises a guide region that does not comprise 2′-F modifications at at least 1, 2, 3, 4, 5, 6, 7, or 8 of nucleotides 8-11, 13, 14, 17, and 18, optionally wherein the guide region comprises 2′-OMe modifications at nucleotides 1-4 and/or phosphorothioate modifications at nucleotides 1-3 and 6-10.
[0998] Embodiment 398 is the gRNA of any one of the preceding embodiments, wherein the gRNA comprises a guide region that does not comprise 2′-F modifications at nucleotides 8-11, 13, 14, 17, and 18, optionally wherein the guide region comprises 2′-OMe modifications at nucleotides 1-4 and/or phosphorothioate modifications at nucleotides 1-3 and 6-10.
[0999] Embodiment 399 is the gRNA of any one of the preceding embodiments, wherein the gRNA comprises a guide region that comprises 2′-OMe modifications at at least 1, 2, 3, or 4 of nucleotides 9, 11, 13, and 14, optionally wherein the guide region comprises 2′-OMe modifications at nucleotides 1-4 and/or phosphorothioate modifications at nucleotides 1-3 and 6-10.
[1000] Embodiment 400 is the gRNA of any one of the preceding embodiments, wherein the gRNA comprises a guide region that comprises 2′-OMe modifications at nucleotides 9, 11, 13, and 14, optionally wherein the guide region comprises 2′-OMe modifications at nucleotides 1-4 and/or phosphorothioate modifications at nucleotides 1-3 and 6-10.
[1001] Embodiment 401 is the gRNA of any one of the preceding embodiments, wherein the gRNA comprises a guide region that comprises phosphorothioate modifications at one or both of nucleotides 8 and 10, optionally wherein the guide region comprises 2′-OMe modifications at nucleotides 1-4, phosphorothioate modifications at nucleotides 1-3 and 6-7, and/or 2′-F modifications at nucleotides 8-11, 13, 14, 17, and 18.
[1002] Embodiment 402 is the gRNA of any one of the preceding embodiments, wherein the gRNA comprises a guide region that comprises modifications at at least 1, 2, 3, 4, 5, 6, 7, 8, 9, 10, 11, 12, 13, or all of the following nucleotides: 1, 2, 3, 4, 6, 7, 8, 9, 10, 11, 13, 14, 17, and 18, optionally wherein the modifications are 2′-OMe, 2′-fluoro, or phosphorothioate modifications.
[1003] Embodiment 403 is the gRNA of any one of the the preceding embodiments, wherein the gRNA comprises a guide region that comprises modifications at nucleotides 1, 2, 3, 4, 6, 7, 8, 9, 10, 11, 13, 14, 17, and 18, optionally wherein the modifications are 2′-OMe, 2′-fluoro, or phosphorothioate modifications.
[1004] Embodiment 404 is the gRNA of any one of the preceding embodiments, wherein 2′-OMe modifications are not present in the guide region at nucleotides 6-11 and 13-end.
[1005] Embodiment 405 is the gRNA of any one of the preceding embodiments, wherein 2′-fluoro modifications are not present in the guide region at nucleotides 1-7, 15, 16, and 19-end.
[1006] Embodiment 406 is the gRNA of any one of the preceding embodiments, wherein phosphorothioate modifications are not present in the guide region at nucleotides 4, 5, 11-14, 17, and 18.
[1007] Embodiment 407 is the gRNA of any one of the preceding embodiments, wherein the guide region comprises an unmodified nucleotide 20.
[1008] Embodiment 408 is the gRNA of any one of the preceding embodiments, wherein the guide region consists of 20 nucleotides.
[1009] Embodiment 409 is the gRNA of any one of the preceding embodiments, wherein the guide region comprises a YA site at nucleotides 5-6 and a modification at nucleotide 5.
[1010] Embodiment 410 is the gRNA of any one of the preceding embodiments, wherein the guide region comprises a YA site at nucleotides 12-13 and a modification at nucleotide 12.
[1011] Embodiment 411 is the gRNA of any one of the preceding embodiments, wherein the guide region comprises a YA site at nucleotides 15-16 and a modification at nucleotide 15.
[1012] Embodiment 412 is the gRNA of any one of the preceding embodiments, wherein the guide region comprises a YA site at nucleotides 16-17 and a modification at nucleotide 16.
[1013] Embodiment 413 is the gRNA of any one of the preceding embodiments, wherein the guide region comprises a YA site at nucleotides 19-20 and a modification at nucleotide 19.
[1014] Embodiment 414 is the gRNA of any one of the preceding embodiments, wherein the guide region does not comprise a YA site at nucleotides 5-6 and nucleotide 5 is unmodified.
[1015] Embodiment 415 is the gRNA of any one of the preceding embodiments, wherein the guide region does not comprise a YA site at nucleotides 12-13 and nucleotide 12 is unmodified.
[1016] Embodiment 416 is the gRNA of any one of the preceding embodiments, wherein the guide region does not comprise a YA site at nucleotides 15-16 and nucleotide 15 is unmodified.
[1017] Embodiment 417 is the gRNA of any one of the preceding embodiments, wherein the guide region does not comprise a YA site at nucleotides 16-17 and nucleotide 16 is unmodified.
[1018] Embodiment 418 is the gRNA of any one of the preceding embodiments, wherein the guide region does not comprise a YA site at nucleotides 19-20 and nucleotide 19 is unmodified.
[1019] Embodiment 419 is the gRNA of any one of the preceding embodiments, wherein the gRNA comprises a guide region that comprises at least 1, 2, 3, 4, 5, 6, 7, 8, 9, 10, 11, 12, 13, or all of the following:
   [1020] a. 2′-OMe and phosphorothioate modifications at nucleotide 1;
   [1021] b. 2′-OMe and phosphorothioate modifications at nucleotide 2;
   [1022] c. 2′-OMe and phosphorothioate modifications at nucleotide 3;
   [1023] d. a 2′-OMe modification at nucleotide 4;
   [1024] e. a phosphorothioate modification at nucleotide 6;
   [1025] f. a phosphorothioate modification at nucleotide 7;
   [1026] g. 2′-fluoro and phosphorothioate modifications at nucleotide 8;
   [1027] h. 2′-fluoro and phosphorothioate modifications at nucleotide 9;
   [1028] i. 2′-fluoro and phosphorothioate modifications at nucleotide 10;
   [1029] j. a 2′-fluoro modification at nucleotide 11;
   [1030] k. a 2′-fluoro modifications at nucleotide 13;
   [1031] l. a 2′-fluoro modifications at nucleotide 14;
   [1032] m. a 2′-fluoro modifications at nucleotide 17; and
   [1033] n. a 2′-fluoro modifications at nucleotide 18.
[1034] Embodiment 420 is the gRNA of any one of the preceding embodiments, wherein the guide region comprises each of the modifications set forth in the preceding embodiment.
[1035] Embodiment 421 is the gRNA of any one of the preceding embodiments, wherein the guide region comprises at least 1, 2, 3, or 4 of the following:
   [1036] i. a 2′-OMe modification at nucleotide 5 if nucleotides 5 and 6 form a YA site;
   [1037] ii. a 2′-OMe modification at nucleotide 12 if nucleotides 12 and 13 form a YA site;
   [1038] iii. a phosphorothioate modification at nucleotide 15 if nucleotides 15 and 16 form a YA site;
   [1039] iv. a phosphorothioate modification at nucleotide 16 if nucleotides 16 and 17 form a YA site; and
   [1040] v. a phosphorothioate or 2′-fluoro modification at nucleotide 19 if nucleotides 19 and 20 form a YA site.
[1041] Embodiment 422 is the gRNA of any one of the preceding embodiments, wherein the guide region comprises a YA site at nucleotides 5-6 and a a 2′-OMe modification at nucleotide 5.
[1042] Embodiment 423 is the gRNA of any one of the preceding embodiments, wherein the guide region comprises a YA site at nucleotides 12-13 and a 2′-OMe modification at nucleotide 12.
[1043] Embodiment 424 is the gRNA of any one of the preceding embodiments, wherein the guide region comprises a YA site at nucleotides 15-16 and a phosphorothioate modification at nucleotide 15.
[1044] Embodiment 425 is the gRNA of any one of the preceding embodiments, wherein the guide region comprises a YA site at nucleotides 16-17 and a phosphorothioate modification at nucleotide 16.
[1045] Embodiment 426 is the gRNA of any one of the preceding embodiments, wherein the guide region comprises a YA site at nucleotides 19-20 and a phosphorothioate modification at nucleotide 19.
[1046] Embodiment 427 is the gRNA of any one of the preceding embodiments, wherein the guide region comprises a 2′-fluoro modification at nucleotide 19.
[1047] Embodiment 428 is the gRNA of any one of the preceding embodiments, wherein the guide region comprises an unmodified nucleotide 15 or only a phosphorothioate modification at nucleotide 15.
[1048] Embodiment 429 is the gRNA of any one of the preceding embodiments, wherein the guide region comprises an unmodified nucleotide 16 or only a phosphorothioate modification at nucleotide 16.
[1049] Embodiment 430 is the gRNA of any one of the preceding embodiments, wherein the gRNA is an sgRNA comprising a conserved portion of an sgRNA comprising a hairpin region, wherein the hairpin region lacks at least 5-10 nucleotides.
[1050] Embodiment 431 is the gRNA of embodiment 430, wherein the at least 5-10 lacking nucleotides are consecutive.
[1051] Embodiment 432 is the gRNA of embodiment 430 or 431, wherein the at least 5-10 lacking nucleotides:
   [1052] i. are within hairpin 1;
   [1053] ii. are within hairpin 1 and the “N” between hairpin 1 and hairpin 2;
   [1054] iii. are within hairpin 1 and the two nucleotides immediately 3′ of hairpin 1;
   [1055] iv. include at least a portion of hairpin 1;
   [1056] v. are within hairpin 2;
   [1057] vi. include at least a portion of hairpin 2;
   [1058] vii. are within hairpin 1 and hairpin 2;
   [1059] viii. include at least a portion of hairpin 1 and include the “N” between hairpin 1 and hairpin 2;
   [1060] ix. include at least a portion of hairpin 2 and include the “N” between hairpin 1 and hairpin 2;
   [1061] x. include at least a portion of hairpin 1, include the “N” between hairpin 1 and hairpin 2, and include at least a portion of hairpin 2;
   [1062] xi. are within hairpin 1 or hairpin 2, optionally including the “N” between hairpin 1 and hairpin 2;
   [1063] xii. are consecutive;
   [1064] xiii. are consecutive and include the “N” between hairpin 1 and hairpin 2;
   [1065] xiv. are consecutive and span at least a portion of hairpin 1 and a portion of hairpin 2;
   [1066] xv. are consecutive and span at least a portion of hairpin 1 and the “N” between hairpin 1 and hairpin 2; or
   [1067] xvi. are consecutive and span at least a portion of hairpin 1 and two nucleotides immediately 3′ of hairpin 1.
[1068] Embodiment 433 is the gRNA of any one of embodiments 430-432, wherein the at least 5-10 nucleotides comprise nucleotides 54-61 of SEQ ID NO:400, nucleotides 53-60 of SEQ ID NO:400; or nucleotides 54-58 of SEQ ID NO:400, optionally wherein the sgRNA comprises modifications at least H1-1 to H1-5 and H2-1 to H2-12.
[1069] Embodiment 434 is the gRNA of any one of embodiments 430-433, wherein the at least 5-10 nucleotides:
   [1070] i. consist of 5-10 nucleotides;
   [1071] ii. consist of 6-10 nucleotides;
   [1072] iii. consist of 5 nucleotides;
   [1073] iv. consist of 6 nucleotides;
   [1074] v. consist of 7 nucleotides;
   [1075] vi. consist of 8 nucleotides;
   [1076] vii. consist of 9 nucleotides;
   [1077] viii. consist of 10 nucleotides;
   [1078] ix. consist of 5-10 consecutive nucleotides;
   [1079] x. consist of 6-10 consecutive nucleotides;
   [1080] xi. consist of 5 consecutive nucleotides;
   [1081] xii. consist of 6 consecutive nucleotides;
   [1082] xiii. consist of 7 consecutive nucleotides;
   [1083] xiv. consist of 8 consecutive nucleotides;
   [1084] xv. consist of 9 consecutive nucleotides; or
   [1085] xvi. consist of 10 consecutive nucleotides.
[1086] Embodiment 435 is the gRNA of embodiment 434, wherein the at least 5-10 nucleotides comprise nucleotides 54-61 of SEQ ID NO:400, nucleotides 53-60 of SEQ ID NO:400; or nucleotides 54-58 of SEQ ID NO:400, optionally wherein the sgRNA comprises modifications at least H1-1 to H1-5 and H2-1 to H2-12.
[1087] Embodiment 436 is the gRNA of any one of embodiments 430-435, wherein the at least 5-10 nucleotides:
   [1088] i. comprise nucleotides 54-61 of SEQ ID NO:400;
   [1089] ii. comprise nucleotides 53-60 of SEQ ID NO:400;
   [1090] iii. comprise nucleotides 54-58 of SEQ ID NO:400.
   [1091] iv. consist of nucleotides 54-61 of SEQ ID NO:400;
   [1092] v. consist of nucleotides 53-60 of SEQ ID NO:400; or
   [1093] vi. consist of nucleotides 54-58 of SEQ ID NO:400.
[1094] Embodiment 437 is the gRNA of any one of the preceding embodiments, wherein the gRNA comprises modifications and/or unmodified nucleotides at at least 15 of nucleotides 1-20 from the 5′ end of the 5′ terminus that match the modification pattern at nucleotides 1-20 of any one of the gRNAs of SEQ ID NOs: 1-54, 201-254, 301-354, 401-535, 601, 607-732, 801, 807-932, 1001, 1007-1132, 1205-1212, 1322-1406, 1417-1501, 1511-1596, 3018-3059, 3063-3104, 3108-3149, 3153-3194, 3198-3239, 3243-3284, 3295-3341, 3343-3385, or 3388-3430.
[1095] Embodiment 438 is the gRNA of any one of the preceding embodiments, wherein the gRNA comprises modifications and/or unmodified nucleotides at at least 16 of nucleotides 1-20 from the 5′ end of the 5′ terminus that match the modification pattern at nucleotides 1-20 of any one of the gRNAs of SEQ ID NOs: 1-54, 201-254, 301-354, 401-535, 601, 607-732, 801, 807-932, 1001, 1007-1132, 1205-1212, 1322-1406, 1417-1501, 1511-1596, 3018-3059, 3063-3104, 3108-3149, 3153-3194, 3198-3239, 3243-3284, 3295-3341, 3343-3385, or 3388-3430.
[1096] Embodiment 439 is the gRNA of any one of the preceding embodiments, wherein the gRNA comprises modifications and/or unmodified nucleotides at at least 17 of nucleotides 1-20 from the 5′ end of the 5′ terminus that match the modification pattern at nucleotides 1-20 of a gRNA, wherein the gRNA is any one of SEQ ID NOs: 1-54, 201-254, 301-354, 401-535, 601, 607-732, 801, 807-932, 1001, 1007-1132, 1205-1212, 1322-1406, 1417-1501, 1511-1596, 3018-3059, 3063-3104, 3108-3149, 3153-3194, 3198-3239, 3243-3284, 3295-3341, 3343-3385, or 3388-3430.
[1097] Embodiment 440 is the gRNA of any one of the preceding embodiments, wherein the gRNA comprises modifications and/or unmodified nucleotides at at least 18 of nucleotides 1-20 from the 5′ end of the 5′ terminus that match the modification pattern at nucleotides 1-20 of any one of the gRNAs of SEQ ID NOs: 1-54, 201-254, 301-354, 401-535, 601, 607-732, 801, 807-932, 1001, 1007-1132, 1205-1212, 1322-1406, 1417-1501, 1511-1596, 3018-3059, 3063-3104, 3108-3149, 3153-3194, 3198-3239, 3243-3284, 3295-3341, 3343-3385, or 3388-3430.
[1098] Embodiment 441 is the gRNA of any one of the preceding embodiments, wherein the gRNA comprises modifications and/or unmodified nucleotides at at least 19 of nucleotides 1-20 from the 5′ end of the 5′ terminus that match the modification pattern at nucleotides 1-20 of any one of the gRNAs of SEQ ID NOs: 1-54, 201-254, 301-354, 401-535, 601, 607-732, 801, 807-932, 1001, 1007-1132, 1205-1212, 1322-1406, 1417-1501, 1511-1596, 3018-3059, 3063-3104, 3108-3149, 3153-3194, 3198-3239, 3243-3284, 3295-3341, 3343-3385, or 3388-3430.
[1099] Embodiment 442 is the gRNA of any one of the preceding embodiments, wherein the gRNA comprises modifications and/or unmodified nucleotides at nucleotides 1-20 from the 5′ end of the 5′ terminus that match the modification pattern at nucleotides 1-20 of any one of the gRNAs of SEQ ID NOs: 1-54, 201-254, 301-354, 401-535, 601, 607-732, 801, 807-932, 1001, 1007-1132, 1205-1212, 1322-1406, 1417-1501, 1511-1596, 3018-3059, 3063-3104, 3108-3149, 3153-3194, 3198-3239, 3243-3284, 3295-3341, 3343-3385, or 3388-3430.
[1100] Embodiment 443 is the gRNA of any one of the preceding embodiments, wherein the gRNA comprises a modification pattern that matches at least 75% of the modification pattern of any one of the gRNAs of SEQ ID NOs: 1-54, 201-254, 301-354, 401-535, 601, 607-732, 801, 807-932, 1001, 1007-1132, 1205-1212, 1322-1406, 1417-1501, 1511-1596, 3018-3059, 3063-3104, 3108-3149, 3153-3194, 3198-3239, 3243-3284, 3295-3341, 3343-3385, or 3388-3430.
[1101] Embodiment 444 is the gRNA of any one of the preceding embodiments, wherein the gRNA comprises the modification pattern of any one of the gRNAs in Table 1, wherein the modification pattern is the same as any one of the gRNAs of SEQ ID NOs: 1-54, 201-254, 301-354, 401-535, 601, 607-732, 801, 807-932, 1001, 1007-1132, 1205-1212, 1322-1406, 1417-1501, 1511-1596, 3018-3059, 3063-3104, 3108-3149, 3153-3194, 3198-3239, 3243-3284, 3295-3341, 3343-3385, or 3388-3430.
[1102] Embodiment 445 is the gRNA of any one of embodiments 437-444, further comprising a sequence having at least 75% identity to the sequence of nucleotides 21-end of the gRNA.
[1103] Embodiment 446 is the gRNA of any one of embodiments 437-444, further comprising a sequence having at least 80% identity to the sequence of nucleotides 21-end of the gRNA.
[1104] Embodiment 447 is the gRNA of any one of embodiments 437-444, further comprising a sequence having at least 85% identity to the sequence of nucleotides 21-end of the gRNA.
[1105] Embodiment 448 is the gRNA of any one of embodiments 437-444, further comprising a sequence having at least 90% identity to the sequence of nucleotides 21-end of the gRNA.
[1106] Embodiment 449 is the gRNA of any one of embodiments 437-444, further comprising a sequence having at least 95% identity to the sequence of nucleotides 21-end of the gRNA.
[1107] Embodiment 450 is the gRNA of any one of embodiments 437-444, further comprising a sequence having at least 98% identity to the sequence of nucleotides 21-end of the gRNA.
[1108] Embodiment 451 is the gRNA of any one of embodiments 437-444, further comprising a sequence having 100% identity to the sequence of nucleotides 21-end of the gRNA.
[1109] Embodiment 452 is an LNP composition comprising a gRNA of any one of the preceding embodiments.
[1110] Embodiment 453 is a composition comprising a gRNA of any one of embodiments 1-451 associated with a lipid nanoparticle (LNP).
[1111] Embodiment 454 is a composition comprising the gRNA of any one of embodiments 1-451, or the composition of any one of embodiments 452-453, further comprising a nuclease or an mRNA which encodes the nuclease.
[1112] Embodiment 455 is the composition of embodiment 454, wherein the nuclease is a Cas protein.
[1113] Embodiment 456 is the composition of embodiment 455, wherein the Cas protein is a Cas9.
[1114] Embodiment 457 is the composition of embodiment 456, wherein the Cas9 is an S. pyogenes Cas9 or an S. aureus Cas9.
[1115] Embodiment 458 is the composition of any one of embodiments 453-457, wherein the nuclease is a nickase or a dCas.
[1116] Embodiment 459 is the composition of any one of embodiments 453-458, wherein the nuclease is modified.
[1117] Embodiment 460 is the composition of embodiment 459 wherein the modified nuclease comprises a nuclear localization signal (NLS).
[1118] Embodiment 461 is the composition of any one of embodiments 452-460, comprising an mRNA which encodes the nuclease.
[1119] Embodiment 462 is the composition of embodiment 461, wherein the mRNA comprises the sequence of any one of SEQ ID NOs: 3499-3527 or 3529-3546.
[1120] Embodiment 463 is a pharmaceutical formulation comprising the gRNA of any one of embodiments 1-451 or the composition of any one of embodiments 452-462 and a pharmaceutically acceptable carrier.
[1121] Embodiment 464 is a method of modifying a target DNA comprising, delivering a Cas protein or a nucleic acid encoding a Cas protein, and any one or more of the following to a cell:
   [1122] i. the gRNA of any one of embodiments 1-451;
   [1123] ii. the composition of any one of embodiments 452-462; and
   [1124] iii. the pharmaceutical formulation of embodiment 463.
[1125] Embodiment 465 is the method of embodiment 464, wherein the method results in an insertion or deletion in a gene.
[1126] Embodiment 466 is the method of embodiment 464 or embodiment 465, further comprising delivering to the cell a template, wherein at least a part of the template incorporates into a target DNA at or near a double strand break site induced by the Cas protein.
[1127] Embodiment 467 is the gRNA of any one of embodiments 1-451, the composition of embodiments 452-462, or the pharmaceutical formulation of embodiment 463 for use in preparing a medicament for treating a disease or disorder.
[1128] Embodiment 468 is the use of the gRNA of any one of embodiments 1-451, the composition of embodiments 452-462, or the pharmaceutical formulation of embodiment 463 in the manufacture of a medicament for treating a disease or disorder.

### FIGURE LEGENDS

[1129] FIGS. 1A and 1B show in vivo % editing and serum TTR results, respectively, for the indicated guides.

[1130] FIGS. 2A and 2B show in vivo % editing and serum TTR results, respectively, for the indicated guides.

[1131] FIGS. 3A and 3B show in vivo % editing and serum TTR results, respectively, for the indicated guides. FIGS. 3C and 3D show in vivo % editing and serum TTR results, respectively, for the indicated guides. FIGS. 3E and 3F show in vivo % editing and serum TTR results, respectively, for the indicated guides in rats.

[1132] FIGS. 4A and 4B show in vivo % editing and serum TTR results, respectively, for the indicated guides.

[1133] FIG. 5 show % editing in neuro2A cells in vitro.

[1134] FIGS. 6A and 6B show in vivo % editing and serum TTR results, respectively, for the indicated guides.

[1135] FIGS. 7A and 7B show in vivo % editing and serum TTR results, respectively, for the indicated guides.

[1136] FIGS. 8A and 8B show in vivo % editing and serum TTR results, respectively, for the indicated guides. FIGS. 8C and 8D show in vivo % editing and serum TTR results, respectively, for the indicated guides.

[1137] FIGS. 9A, 9B, and 9C show % editing by concentration in PHH (9A), PCH (9B), and HepG2 (9C) cells, respectively, for the indicated guides.

[1138] FIG. 10A shows an exemplary sgRNA (SEQ ID NO: 801, methylation not shown) in a possible secondary structure with labels designating individual nucleotides of the conserved region of the sgRNA, including the lower stem, bulge, upper stem, nexus (the nucleotides of which can be referred to as N1 through N18, respectively, in the 5′ to 3′ direction), and the hairpin region which includes hairpin 1 and hairpin 2 regions. A nucleotide between hairpin 1 and hairpin 2 is labeled n. A guide region may be present on an sgRNA and is indicated in this figure as “(N)x” preceding the conserved region of the sgRNA.

[1139] FIG. 10B labels the 10 conserved region YA sites in an exemplary sgRNA sequence (SEQ ID NO: 801, methylation not shown) from 1 to 10. The numbers 25, 45, 50, 56, 64, 67, and 83 indicate the position of the pyrimidine of YA sites 1, 5, 6, 7, 8, 9, and 10 in an sgRNA with a guide region indicated as (N)ₓ, e.g., wherein x is optionally 20.

[1140] FIG. 11A-E show results of nuclease stability assays in which the indicated guides were incubated with 0.01 mg/mL human liver cytosol (HLC) and cleavage sites were determined. FLP indicates signal from full-length product.

[1141] FIG. 11F illustrates the location of cleavage sites observed in FIGS. 11A-E mapped onto an exemplary guide sequence and possible secondary structure of SEQ ID NO: 401 (not all modifications are shown). Open triangles show YA cleavage sites in the guide region. Closed triangles show YA cleavage sites in the conserved region.

[1142] FIGS. 12A-G show results of nuclease stability assays in which the indicated guides were incubated with 0.01 mg/mL human liver cytosol (HLC) and cleavage sites were determined.

[1143] FIGS. 13A-B show results of nuclease stability assays in which G010039 was incubated with 0.01 mg/mL (A) or 8.5 mg/mL (B) human liver cytosol (HLC).

[1144] FIG. 14 shows % editing results from experiments in which lipoplexes comprising the indicated guides were transfected into primary mouse hepatocytes (PMH).

[1145] FIG. 15A-C show % editing results from experiments in which lipoplexes comprising the indicated guides were transfected into PMH, primary cynomolgous macaque hepatocytes (PCH), or primary human hepatocytes (PHH), respectively.

[1146] FIG. 16A shows a scatter plot and correlation values for % editing results from experiments in which sgRNA was administered to mice in vivo or delivered to PMH via lipoplex transfection of the sgRNA.

[1147] FIGS. 16B-F show correlation of in vivo and in vitro % editing results in which the in vitro results were generated by delivering the sgRNAs in LNPs to PHH.

[1148] FIG. 16G shows a comparison of % editing with the indicated guides delivered to PMH by lipoplex transfection (data above left box), to PMH in LNP (data above center box), or to mice in vivo (data above right box).

[1149] FIG. 16H shows a comparison of % editing with the indicated guides delivered to PMH in LNP (1 ng, 3 ng, 10 ng) or to mice in vivo (0.1 mpk, 0.3 mpk).

[1150] FIG. 16I shows the results from FIG. 16G replotted to indicate differences in editing between G000282 and G000211. The barplot values were generated by dividing % editing of the G000282 value by the % editing of the G000211 value to indicate fold differences in editing. The indicated guides were delivered to PMH by lipoplex transfection (data above left box), to PMH in LNP (data above center box), or to mice in vivo (data above right box).

[1151] FIG. 16J shows the results from FIG. 16H replotted to indicate differences in editing between G000283 and G000269. The barplot values were generated by dividing % editing of the G000283 value by the % editing of the G000269 value to indicate fold differences in editing. The indicated guides were delivered to PMH in LNP (data above left box) or to mice in vivo (data above right box).

[1152] FIGS. 17A-B show in vivo % editing and serum TTR results, respectively, for the indicated guides.

[1153] FIGS. 18A-B show in vivo % editing and serum TTR results, respectively, for the indicated guides. FIGS. 18C-D show in vivo % editing and serum TTR results, respectively, for the indicated guides. FIGS. 18E-F show in vivo % editing and serum TTR results, respectively, for the indicated guides.

[1154] FIGS. 19A-B show in vivo % editing and serum TTR results, respectively, for the indicated guides. FIGS. 19C-D show in vivo % editing and serum TTR results, respectively, for the indicated guides.

[1155] FIGS. 20A-B show in vivo % editing and serum TTR results, respectively, for the indicated guides at the indicated concentrations. FIGS. 20C-D show in vivo % editing and serum TTR results, respectively, for the indicated guides at the indicated concentrations. FIGS. 20E-F show in vivo % editing and serum TTR results, respectively, for the indicated guides at the indicated concentrations.

[1156] FIGS. 21A-B show in vivo % editing and serum TTR results, respectively, for the indicated guides.

[1157] FIGS. 22A-B show in vivo % editing and serum TTR results, respectively, for the indicated guides.

[1158] FIGS. 23A-B show editing frequency for the indicated guides.

[1159] FIGS. 24A-B show in vivo % editing and serum TTR results, respectively, for the indicated guides.

[1160] FIGS. 25A-E show indel frequency versus guide concentration for the indicated guides.

[1161] FIGS. 26A-E show indel frequency versus guide concentration for the indicated guides.

[1162] FIGS. 27A-D show indel frequency versus guide concentration for the indicated guides.

[1163] FIGS. 28A-D show indel frequency versus guide concentration for the indicated guides.

[1164] FIGS. 29A-B and 29F show editing frequency for guides with the indicated dinucleotide modification (for a given 5′ modified position, the immediately subsequent position was also modified in the same way). FIGS. 29C-E show editing frequency for guides with the indicated modification at an individual nucleotide.

[1165] FIGS. 30A-C show influence scores for the indicated modification at guide positions 1-20.

[1166] FIGS. 31A-C show editing frequency for the indicated guides. Guides are grouped into boxes based on having similar conserved region modification patterns.

### DETAILED DESCRIPTION

[1167] Provided herein are modified guide RNAs (gRNAs) for use in gene editing methods. Sequences of engineered and tested gRNAs are shown in Table 1.

[1168] Certain of the gRNAs provided herein are modified dual guide RNAs (dgRNAs) for use in gene editing methods. Sequences of engineered and tested dgRNAs are shown in Table 1. Certain of the dgRNAs have certain modifications at YA sites in the dgRNA, including modifications in the crRNA and/or the trRNA.

[1169] Certain of the gRNAs provided herein are modified single guide RNAs (sgRNAs) for use in gene editing methods. Sequences of engineered and tested sgRNAs are shown in Table 1. Certain of the sgRNAs have certain modifications at YA sites in the sgRNA, including modifications in the crRNA portion of the sgRNA and/or the trRNA portion of the sgRNA.

[1170] Also provided herein are short-single guide RNAs (short-sgRNAs), optionally modified, for use in gene editing methods. Sequences of engineered and tested short-sgRNAs are shown in Table 1. Certain of the short-sgRNAs have certain modifications at YA sites in the short-sgRNA, including modifications in the crRNA portion of the short-sgRNA and/or the trRNA portion of the short-sgRNA.

[1171] This disclosure further provides uses of these gRNAs (e.g., sgRNA, short-sgRNA, dgRNA, or crRNA) to alter the genome of a target nucleic acid in vitro (e.g., cells cultured in vitro for use in ex vivo therapy or other uses of genetically edited cells) or in a cell in a subject such as a human (e.g., for use in in vivo therapy). The present disclosure also provides methods for preventing or treating a disease in a subject by modifying a target gene associated with a disease. The disclosed gRNAs can be used with any cell type and at any genetic locus amenable to nuclease mediated genome editing technology.

Lengthy table referenced here
US20210087568A1-20210325-T00001
Please refer to the end of the specification for access instructions.

[1172] Nucleotide modifications are indicated in Table 1 as follows: m: 2′-OMe; *: PS linkage; f: 2′-fluoro; (invd): inverted abasic; moe: 2′-moe; e: ENA; d: deoxyribonucleotide (also note that T is always a deoxyribonucleotide); x: UNA. Thus, for example, mA represents 2′-O-methyl adenosine; xA represents a UNA nucleotide with an adenine nucleobase; eA represents an ENA nucleotide with an adenine nucleobase; and dA represents an adenosine deoxyribonucleotide.

[1173] sgRNA designations are sometimes provided with one or more leading zeroes immediately following the G. This does not affect the meaning of the designation. Thus, for example, G000282, G0282, G00282, and G282 refer to the same sgRNA. Similarly, crRNA and or trRNA designations are sometimes provided with one or more leading zeroes immediately following the CR or TR, respectively, which does not affect the meaning of the designation. Thus, for example, CR000100, CR00100, CR0100, and CR100 refer to the same crRNA, and TR000200, TR00200, TR0200, and TR200 refer to the same trRNA.

[1174] For SEQ ID NOs: 401-535, 1001, and 1007-1032, positions correspond to sgRNA regions as follows: 1-20, guide region; 21-26 and 45-50, lower stem; 27-28 and 41-44, bulge; 29-40, upper stem (of which 33-36 are a tetraloop); 51-68, nexus; 69-80, hairpin 1; 82-96, hairpin 2 (position 81 is a nucleotide between hairpin 1 and hairpin 2); 97-100, 3′ terminus region.

[1175] For SEQ ID NOs 601 and 607-732, no guide region is shown and the positions corresponding to the remaining regions are each decremented by 20 relative to those given for SEQ ID NOs: 401-532. For SEQ ID NOs 801 and 807-932, the spacer is the length of x and the positions corresponding to the remaining regions are each decremented by 20 and incremented by x relative to those given for SEQ ID NOs: 401-532.

### Definitions

[1176] “Editing efficiency” or “editing percentage” or “percent editing” as used herein is the total number of sequence reads with insertions or deletions of nucleotides into the target region of interest over the total number of sequence reads following cleavage by a Cas RNP.

[1177] “Regions” as used herein describes conserved groups of nucleic acids. Regions may also be referred to as “modules” or “domains.” Regions of an sgRNA may perform particular functions, e.g., in directing endonuclease activity of the RNP, for example as described in Briner A E et al., Molecular Cell 56:333-339 (2014). Exemplary regions of an sgRNA are described in Table 3.

[1178] “Hairpin” as used herein describes a duplex of nucleic acids that is created when a nucleic acid strand folds and forms base pairs with another section of the same strand. A hairpin may form a structure that comprises a loop or a U-shape. In some embodiments, a hairpin may be comprised of an RNA loop. Hairpins can be formed with two complementary sequences in a single nucleic acid molecule bind together, with a folding or wrinkling of the molecule. In some embodiments, hairpins comprise stem or stem loop structures. As used herein, a “hairpin region” refers to hairpin 1 and hairpin 2 and the “n” between hairpin 1 and hairpin 2 of a conserved portion of an sgRNA.

[1179] “Ribonucleoprotein” (RNP) or “RNP complex” as used herein describes an sgRNA, for example, together with a nuclease, such as a Cas protein. In some embodiments, the RNP comprises Cas9 and gRNA (e.g., sgRNA, short-sgRNA, dgRNA, or crRNA).

[1180] “Stem loop” as used herein describes a secondary structure of nucleotides that form a base-paired “stem” that ends in a loop of unpaired nucleic acids. A stem may be formed when two regions of the same nucleic acid strand are at least partially complementary in sequence when read in opposite directions. “Loop” as used herein describes a region of nucleotides that do not base pair (i.e., are not complementary) that may cap a stem. A “tetraloop” describes a loop of 4 nucleotides. As used herein, the upper stem of an sgRNA may comprise a tetraloop.

[1181] “Guide RNA”, “gRNA”, and “guide” are used herein interchangeably to refer to either a crRNA (also known as CRISPR RNA), or the combination of a crRNA and a trRNA (also known as tracrRNA). The crRNA and trRNA may be associated as a single RNA molecule (single guide RNA, sgRNA) or in two separate RNA molecules (dual guide RNA, dgRNA). “Guide RNA” or “gRNA” refers to each type. The trRNA may be a naturally-occurring sequence, or a trRNA sequence with modifications or variations compared to naturally-occurring sequences. Guide RNAs can include modified RNAs as described herein.

[1182] In some embodiments, the gRNA (e.g., sgRNA) comprises a “guide region”, which is sometimes referred to as a “spacer” or “spacer region,” for example, in Briner A E et al., Molecular Cell 56:333-339 (2014) for sgRNA (but applicable herein to all guide RNAs). The guide region or spacer region is also sometimes referred to as a “variable region,” “guide domain” or “targeting domain.” In some embodiments, a “guide region” immediately precedes a “conserved portion of an sgRNA” at its 5′ end, and in some embodiments the sgRNA is a short-sgRNA. An exemplary “conserved portion of an sgRNA” is shown in Table 2. In some embodiments, a “guide region” comprises a series of nucleotides at the 5′ end of a crRNA. In some embodiments, the guide region comprises one or more YA sites (“guide region YA sites”). In some embodiments, the guide region comprises one or more YA sites located at positions from a given nucleotide relative to the 5′ end to the end of the guide region. Such ranges of positions are referred to as, e.g., “5-end, 6-end, 7-end, 8-end, 9-end, or 10-end from the 5′ end of the 5′ terminus” where the “end” in “5-end”, etc., refers to most 3′ nucleotide in the guide region. (Similarly, expressions such as “nucleotides 21-end of the gRNA” refer to the range from nucleotide 21 from the 5′ end of the 5′ terminus of the gRNA to the final nucleotide at the 3′ end of the gRNA.) Furthermore, a nucleotide that is, for example, 6 nucleotides from the 5′ end of a particular sgRNA segment is the sixth nucleotide of that segment, or “nucleotide 6” from the 5′ end, e.g., , where N is the 6^{th} nucleotide from the 5′ end. A range of nucleotides that is located “at or after” 6 nucleotides from the 5′ end begins with the 6^{th} nucleotide and continues down the chain toward the 3′ end. Similarly, a nucleotide that is, for example, 5 nucleotides from the 3′ end of the chain is the 5^{th} nucleotide when counting from the 3′ end of the chain, e.g. NXXXX. A numeric position or range in the guide region refers to the position as determined from the 5′ end unless another point of reference is specified; for example, “nucleotide 5” in a guide region is the 5^{th} nucleotide from the 5′ end.

[1183] In some embodiments, a gRNA comprises nucleotides that “match the modification pattern” at corresponding or specified nucleotides of a gRNA described herein. This means that the nucleotides matching the modification pattern have the same modifications (e.g., phosphorothioate, 2′-fluoro, 2′-OMe, etc.) as the nucleotides at the corresponding positions of the gRNA described herein, regardless of whether the nucleobases at those positions match. For example, if in a first gRNA, nucleotides 5 and 6, respectively, have 2′-OMe and phosphorothioate modifications, then this gRNA has the same modification pattern at nucleotides 5 and 6 as a second gRNA that also has 2′-OMe and phosphorothioate modifications at nucleotides 5 and 6, respectively, regardless of whether the nucleobases at positions 5 and 6 are the same or different in the first and second gRNAs. However, a 2′-OMe modification at nucleotide 6 but not nucleotide 7 is not the same modification pattern at nucleotides 6 and 7 as a 2′-OMe modification at nucleotide 7 but not nucleotide 6. Similarly, a modification pattern that matches at least 75% of the modification pattern of a gRNA described herein means that at least 75% of the nucleotides have the same modifications as the corresponding positions of the gRNA described herein. Corresponding positions may be determined by pairwise or structural alignment.

[1184] A “conserved region” of a S. pyogenes Cas9 (“spyCas9” (also referred to as “spCas9”)) sgRNA” is shown in Table 2. The first row shows the numbering of the nucleotides; the second row shows the sequence (e.g., SEQ ID NO: 400); and the third row shows the regions.

[1185] As used herein, a “short-single guide RNA” (“short-sgRNA”) is an sgRNA comprising a conserved portion of an sgRNA comprising a hairpin region, wherein the hairpin region lacks at least 5-10 or 6-10 nucleotides. In some embodiments, a short-sgRNA lacks at least nucleotides 54-58 (AAAAA) of the conserved portion of a S. pyogenes Cas9 (“spyCas9”) sgRNA, as shown in Table 2. In some embodiments, a short-sgRNA is a non-spyCas9 sgRNA that lacks nucleotides corresponding to nucleotides 54-58 (AAAAA) of the conserved portion of a spyCas9 as determined, for example, by pairwise or structural alignment. In some embodiments, a short-sgRNA lacks at least nucleotides 54-61 (AAAAAGUG) of the conserved portion of a spyCas9 sgRNA. In some embodiments, a short-sgRNA lacks at least nucleotides 53-60 (GAAAAAGU) of the conserved portion of a spyCas9 sgRNA. In some embodiments, a short-sgRNA lacks 4, 5, 6, 7, or 8 nucleotides of nucleotides 53-60 (GAAAAAGU) or nucleotides 54-61 (AAAAAGUG) of the conserved portion of a spyCas9 sgRNA, or the corresponding nucleotides of the conserved portion of a non-spyCas9 sgRNA as determined, for example, by pairwise or structural alignment.

[1186] As used herein, a “YA site” refers to a 5′-pyrimidine-adenine-3′ dinucleotide. For clarification, a “YA site” in an original sequence that is altered by modifying a base is still considered a (modified) YA site in the resulting sequence, regardless of the absence of a literal YA dinucleotide. A “conserved region YA site” is present in the conserved region of an sgRNA. A “guide region YA site” is present in the guide region of an sgRNA. An unmodified YA site in an sgRNA may be susceptible to cleavage by RNase-A like endonucleases, e.g., RNase A. In some embodiments, a short-sgRNA comprises about 10 YA sites in its conserved region. In some embodiments, an sgRNA comprises 1, 2, 3, 4, 5, 6, 7, 8, 9, or 10 YA sites in its conserved region. Exemplary conserved region YA sites are indicated in FIG. 10B. Exemplary guide region YA sites are not shown in FIG. 10B, as the guide region may be any sequence, including any number of YA sites. In some embodiments, an sgRNA comprises 1, 2, 3, 4, 5, 6, 7, 8, 9, or 10 of the YA sites indicated in FIG. 10B. In some embodiments, an sgRNA comprises 1, 2, 3, 4, 5, 6, 7, 8, 9, or 10 YA sites at the following positions or a subset thereof: LS5-LS6; US3-US4; US9-US10; US12-B3; LS7-LS8; LS12-N1; N6-N7; N14-N15; N17-N18; and H2-2 to H2-3. In some embodiments, a YA site comprises a modification, meaning that at least one nucleotide of the YA site is modified. In some embodiments, the pyrimidine (also called the pyrimidine position) of the YA site comprises a modification (which includes a modification altering the internucleoside linkage immediately 3′ of the sugar of the pyrimidine). In some embodiments, the adenine (also called the adenine position) of the YA site comprises a modification (which includes a modification altering the internucleoside linkage immediately 3′ of the sugar of the adenine). In some embodiments, the pyrimidine position and the adenine position of the YA site comprise modifications. In some embodiments, a short-sgRNA guide region or short-sgRNA conserved region described herein comprises one or more YA sites (“guide region YA sites” or “conserved region YA sites”). In some embodiments, a crRNA or a trRNA described herein comprises one or more YA sites.

[1187] As discussed herein, positions of nucleotides corresponding to those described with respect to spyCas9 gRNA can be identified in another gRNA with sequence and/or structural similarity by pairwise or structural alignment. Structural alignment is useful where molecules share similar structures despite considerable sequence variation. For example, spyCas9 and Staphylococcus aureus Cas9 (“SaCas9”) have divergent sequences, but significant structural alignment. See, e.g., FIG. 2(F) from Nishimasu et al., Cell 162(5): 1113-1126 (2015). Structural alignment can be used to identify nucleotides in a saCas9 or other sgRNA that correspond to particular positions, such as nucleotides 54-58 (AAAAA) of the conserved portion of a spyCas9 sgRNA.

[1188] Structural alignment involves identifying corresponding residues across two (or more) sequences by (i) modeling the structure of a first sequence using the known structure of the second sequence or (ii) comparing the structures of the first and second sequences where both are known, and identifying the residue in the first sequence most similarly positioned to a residue of interest in the second sequence. Corresponding residues are identified in some algorithms based on distance minimization given position (e.g., nucleobase position 1 or the 1′ carbon of the pentose ring for polynucleotides, or alpha carbons for polypeptides) in the overlaid structures (e.g., what set of paired positions provides a minimized root-mean-square deviation for the alignment). When identifying positions in a non-spyCas9 gRNA corresponding to positions described with respect to spyCas9 gRNA, spyCas9 gRNA can be the “second” sequence. Where a non-spyCas9 gRNA of interest does not have an available known structure, but is more closely related to another non-spyCas9 gRNA that does have a known structure, it may be most effective to model the non-spyCas9 gRNA of interest using the known structure of the closely related non-spyCas9 gRNA, and then compare that model to the spyCas9 gRNA structure to identify the desired corresponding residue in the non-spyCas9 gRNA of interest. There is an extensive literature on structural modeling and alignment for proteins; representative disclosures include U.S. Pat. Nos. 6,859,736; 8,738,343; and those cited in Aslam et al., Electronic Journal of Biotechnology 20 (2016) 9-13. For discussion of modeling a structure based on a known related structure or structures, see, e.g., Bordoli et al., Nature Protocols 4 (2009) 1-13, and references cited therein. See also FIG. 2(F) from Nishimasu et al., Cell 162(5): 1113-1126 (2015) for alignment of nucleic acid.

[1189] A “target sequence” as used herein refers to a sequence of nucleic acid to which the guide region directs a nuclease for cleavage. In some embodiments, a spyCas9 protein may be directed by a guide region to a target sequence by the nucleotides present in the guide region. In some embodiments, the sgRNA does not comprise a spacer region.

[1190] As used herein, the “5′ end” refers to the first nucleotide of the gRNA (including a dgRNA (typically the 5′ end of the crRNA of the dgRNA), sgRNA or a short-sgRNA), in which the 5′ position is not linked to another nucleotide.

[1191] As used herein, a “5′ end modification” refers to a gRNA comprising a guide region having modifications in one or more of the one (1) to about seven (7) nucleotides at its 5′ end, optionally wherein the first nucleotide (from the 5′ end) of the gRNA is modified.

[1192] As used herein, the “3′ end” refers to the end or terminal nucleotide of a gRNA, in which the 3′ position is not linked to another nucleotide. In some embodiment, the 3′ end is in the 3′ tail. In some embodiments, the 3′ end is in the conserved portion of an gRNA.

[1193] As used herein, a “3′ end modification” refers to a gRNA having modifications in one or more of the one (1) to about seven (7) nucleotides at its 3′ end, optionally wherein the last nucleotide (i.e., the 3′ most nucleotide) of the gRNA is modified. If a 3′ tail is present, the 1 to about 7 nucleotides may be within the 3′ tail. If a 3′ tail is not present, the 1 to about 7 nucleotides may be within the conserved portion of a sgRNA.

[1194] The “last,” “second to last,” “third to last,” etc., nucleotide refers to the 3′ most, second 3′ most, third 3′ most, etc., nucleotide, respectively in a given sequence. For example, in the sequence 5′-AAACTG-3′, the last, second to last, and third to last nucleotides are G, T, and C, respectively. The phrase “last 3 nucleotides” refers to the last, second to last, and third to last nucleotides; more generally, “last N nucleotides” refers to the last to the Nth to last nucleotides, inclusive. “Third nucleotide from the 3′ end of the 3′ terminus” is equivalent to “third to last nucleotide.” Similarly, “third nucleotide from the 5′ end of the 5′ terminus” is equivalent to “third nucleotide at the 5′ terminus.”

[1195] As used herein, a “protective end modification” (such as a protective 5′ end modification or protective 3′ end modification) refers to a modification of one or more nucleotides within seven nucleotides of the end of an sgRNA that reduces degradation of the sgRNA, such as exonucleolytic degradation. In some embodiments, a protective end modification comprises modifications of at least two or at least three nucleotides within seven nucleotides of the end of the sgRNA. In some embodiments, the modifications comprise phosphorothioate linkages, 2′ modifications such as 2′-OMe or 2′-fluoro, 2′-H (DNA), ENA, UNA, or a combination thereof. In some embodiments, the modifications comprise phosphorothioate linkages and 2′-OMe modifications. In some embodiments, at least three terminal nucleotides are modified, e.g., with phosphorothioate linkages or with a combination of phosphorothioate linkages and 2′-OMe modifications. Modifications known to those of skill in the art to reduce exonucleolytic degradation are encompassed.

[1196] In some embodiments, a “3′ tail” comprising between 1 and about 20 nucleotides follows the conserved portion of a sgRNA at its 3′ end.

[1197] As used herein, an “RNA-guided DNA binding agent” means a polypeptide or complex of polypeptides having RNA and DNA binding activity, or a DNA-binding subunit of such a complex, wherein the DNA binding activity is sequence-specific and depends on the sequence of the RNA. Exemplary RNA-guided DNA binding agents include Cas cleavases/nickases and inactivated forms thereof (“dCas DNA binding agents”). “Cas nuclease”, also called “Cas protein”, as used herein, encompasses Cas cleavases, Cas nickases, and dCas DNA binding agents. Cas cleavases/nickases and dCas DNA binding agents include a Csm or Cmr complex of a type III CRISPR system, the Cas10, Csm1, or Cmr2 subunit thereof, a Cascade complex of a type I CRISPR system, the Cas3 subunit thereof, and Class 2 Cas nucleases. As used herein, a “Class 2 Cas nuclease” is a single-chain polypeptide with RNA-guided DNA binding activity, such as a Cas9 nuclease or a Cpf1 nuclease. Class 2 Cas nucleases include Class 2 Cas cleavases and Class 2 Cas nickases (e.g., H840A, D10A, or N863A variants), which further have RNA-guided DNA cleavases or nickase activity, and Class 2 dCas DNA binding agents, in which cleavase/nickase activity is inactivated. Class 2 Cas nucleases include, for example, Cas9, Cpf1, C2c1, C2c2, C2c3, HF Cas9 (e.g., N497A, R661A, Q695A, Q926A variants), HypaCas9 (e.g., N692A, M694A, Q695A, H698A variants), eSPCas9(1.0) (e.g, K810A, K1003A, R1060A variants), and eSPCas9(1.1) (e.g., K848A, K1003A, R1060A variants) proteins and modifications thereof. Cpf1 protein, Zetsche et al., Cell, 163: 1-13 (2015), is homologous to Cas9, and contains a RuvC-like nuclease domain. Cpf1 sequences of Zetsche are incorporated by reference in their entirety. See, e.g., Zetsche, Tables S1 and S3. “Cas9” encompasses Spy Cas9, the variants of Cas9 listed herein, and equivalents thereof. See, e.g., Makarova et al., Nat Rev Microbiol, 13(11): 722-36 (2015); Shmakov et al., Molecular Cell, 60:385-397 (2015).

[1198] As used herein, a first sequence is considered to “comprise a sequence with at least X % identity to” a second sequence if an alignment of the first sequence to the second sequence shows that X % or more of the positions of the second sequence in its entirety are matched by the first sequence. For example, the sequence AAGA comprises a sequence with 100% identity to the sequence AAG because an alignment would give 100% identity in that there are matches to all three positions of the second sequence. The differences between RNA and DNA (generally the exchange of uridine for thymidine or vice versa) and the presence of nucleoside analogs such as modified uridines do not contribute to differences in identity or complementarity among polynucleotides as long as the relevant nucleotides (such as thymidine, uridine, or modified uridine) have the same complement (e.g., adenosine for all of thymidine, uridine, or modified uridine; another example is cytosine and 5-methylcytosine, both of which have guanosine or modified guanosine as a complement). Thus, for example, the sequence 5′-AXG where X is any modified uridine, such as pseudouridine, N1-methyl pseudouridine, or 5-methoxyuridine, is considered 100% identical to AUG in that both are perfectly complementary to the same sequence (5′-CAU). Exemplary alignment algorithms are the Smith-Waterman and Needleman-Wunsch algorithms, which are well-known in the art. One skilled in the art will understand what choice of algorithm and parameter settings are appropriate for a given pair of sequences to be aligned; for sequences of generally similar length and expected identity >50% for amino acids or >75% for nucleotides, the Needleman-Wunsch algorithm with default settings of the Needleman-Wunsch algorithm interface provided by the EBI at the www.ebi.ac.uk web server is generally appropriate.

[1199] “mRNA” is used herein to refer to a polynucleotide that is RNA or modified RNA and comprises an open reading frame that can be translated into a polypeptide (i.e., can serve as a substrate for translation by a ribosome and amino-acylated tRNAs). mRNA can comprise a phosphate-sugar backbone including ribose residues or analogs thereof, e.g., 2′-methoxy ribose residues. In some embodiments, the sugars of a nucleic acid phosphate-sugar backbone consist essentially of ribose residues, 2′-methoxy ribose residues, or a combination thereof. In general, mRNAs do not contain a substantial quantity of thymidine residues (e.g., 0 residues or fewer than 30, 20, 10, 5, 4, 3, or 2 thymidine residues; or less than 10%, 9%, 8%, 7%, 6%, 5%, 4%, 4%, 3%, 2%, 1%, 0.5%, 0.2%, or 0.1% thymidine content). An mRNA can contain modified uridines at some or all of its uridine positions.

[1200] As used herein, the “minimum uridine content” of a given ORF is the uridine content of an ORF that (a) uses a minimal uridine codon at every position and (b) encodes the same amino acid sequence as the given ORF. The minimal uridine codon(s) for a given amino acid is the codon(s) with the fewest uridines (usually 0 or 1 except for a codon for phenylalanine, where the minimal uridine codon has 2 uridines). Modified uridine residues are considered equivalent to uridines for the purpose of evaluating minimum uridine content.

[1201] As used herein, the “minimum uridine dinucleotide content” of a given ORF is the lowest possible uridine dinucleotide (UU) content of an ORF that (a) uses a minimal uridine codon (as discussed above) at every position and (b) encodes the same amino acid sequence as the given ORF. The uridine dinucleotide (UU) content can be expressed in absolute terms as the enumeration of UU dinucleotides in an ORF or on a rate basis as the percentage of positions occupied by the uridines of uridine dinucleotides (for example, AUUAU would have a uridine dinucleotide content of 40% because 2 of 5 positions are occupied by the uridines of a uridine dinucleotide). Modified uridine residues are considered equivalent to uridines for the purpose of evaluating minimum uridine dinucleotide content.

[1202] As used herein, the “minimum adenine content” of a given open reading frame (ORF) is the adenine content of an ORF that (a) uses a minimal adenine codon at every position and (b) encodes the same amino acid sequence as the given ORF. The minimal adenine codon(s) for a given amino acid is the codon(s) with the fewest adenines (usually 0 or 1 except for a codon for lysine and asparagine, where the minimal adenine codon has 2 adenines). Modified adenine residues are considered equivalent to adenines for the purpose of evaluating minimum adenine content.

[1203] As used herein, the “minimum adenine dinucleotide content” of a given open reading frame (ORF) is the lowest possible adenine dinucleotide (AA) content of an ORF that (a) uses a minimal adenine codon (as discussed above) at every position and (b) encodes the same amino acid sequence as the given ORF. The adenine dinucleotide (AA) content can be expressed in absolute terms as the enumeration of AA dinucleotides in an ORF or on a rate basis as the percentage of positions occupied by the adenines of adenine dinucleotides (for example, UAAUA would have an adenine dinucleotide content of 40% because 2 of 5 positions are occupied by the adenines of an adenine dinucleotide). Modified adenine residues are considered equivalent to adenines for the purpose of evaluating minimum adenine dinucleotide content.

[1204] As used herein, a “subject” refers to any member of the animal kingdom. In some embodiments, “subject” refers to humans. In some embodiments, “subject” refers to non-human animals. In some embodiments, “subject” refers to primates. In some embodiments, subjects include, but are not limited to, mammals, birds, reptiles, amphibians, fish, insects, and/or worms. In certain embodiments, the non-human subject is a mammal (e.g., a rodent, a mouse, a rat, a rabbit, a monkey, a dog, a cat, a sheep, cattle, a primate, and/or a pig). In some embodiments, a subject may be a transgenic animal, genetically-engineered animal, and/or a clone. In certain embodiments of the present invention the subject is an adult, an adolescent or an infant. In some embodiments, terms “individual” or “patient” are used and are intended to be interchangeable with “subject”.

Types of Modifications described herein

[1205] Guide RNAs (e.g., sgRNAs, short-sgRNAs, dgRNAs, and crRNAs) comprising modifications at various positions are disclosed herein. In some embodiments, a position of a gRNA that comprises a modification is modified with any one or more of the following types of modifications.

### 2′-O-methyl Modifications

[1206] Modified sugars are believed to control the puckering of nucleotide sugar rings, a physical property that influences oligonucleotide binding affinity for complementary strands, duplex formation, and interaction with nucleases. Substitutions on sugar rings can therefore alter the conformation and puckering of these sugars. For example, 2′-O-methyl (2′-OMe) modifications can increase binding affinity and nuclease stability of oligonucleotides, though as shown in the Examples, the effect of any modification at a given position in an oligonucleotide needs to be empirically determined.

[1207] The terms “mA,” “mC,” “mU,” or “mG” may be used to denote a nucleotide that has been modified with 2′-OMe.

[1208] A ribonucleotide and a modified 2′-O-methyl ribonucleotide can be depicted as follows:

[chemical structure]

2′-O-(2-methoxyethyl) Modifications

[1209] In some embodiments, the modification may be 2′-O-(2-methoxyethyl) (2′-O-moe). A modified 2′-O-moe ribonucleotide can be depicted as follows:

[chemical structure]

[1210] The terms “moeA,” “moeC,” “moeU,” or “moeG” may be used to denote a nucleotide that has been modified with 2′-O-moe.

2′-fluoro Modifications

[1211] Another chemical modification that has been shown to influence nucleotide sugar rings is halogen substitution. For example, 2′-fluoro (2′-F) substitution on nucleotide sugar rings can increase oligonucleotide binding affinity and nuclease stability.

[1212] In this application, the terms “fA,” “fC,” “fU,” or “fG” may be used to denote a nucleotide that has been substituted with 2′-F.

[1213] A ribonucleotide without and with a 2′-F substitution can be depicted as follows:

[chemical structure]

### Phosphorothioate Modifications

[1214] A phosphorothioate (PS) linkage or bond refers to a bond where a sulfur is substituted for one nonbridging phosphate oxygen in a phosphodiester linkage, for example between nucleotides. When phosphorothioates are used to generate oligonucleotides, the modified oligonucleotides may also be referred to as S-oligos.

[1215] A “*” may be used to depict a PS modification. In this application, the terms A*, C*, U*, or G* may be used to denote a nucleotide that is linked to the next (e.g., 3′) nucleotide with a PS bond. Throughout this application, PS modifications are grouped with the nucleotide whose 3′ carbon is bonded to the phosphorothioate; thus, indicating that a PS modification is at position 1 means that the phosphorothioate is bonded to the 3′ carbon of nucleotide 1 and the 5′ carbon of nucleotide 2. Thus, where a YA site is indicated as being “PS modified” or the like, the PS linkage is between the Y and A or between the A and the next nucleotide.

[1216] In this application, the terms “mA*,” “mC*,” “mU*,” or “mG*” may be used to denote a nucleotide that has been substituted with 2′-OMe and that is linked to the next (e.g., 3′) nucleotide with a PS linkage, which may sometimes be referred to as a “PS bond.” Similarly, the terms “fA*,” “fC*,” “fU*,” or “fG*” may be used to denote a nucleotide that has been substituted with 2′-F and that is linked to the next (e.g., 3′) nucleotide with a PS linkage. Equivalents of a PS linkage or bond are encompassed by embodiments described herein.

[1217] The diagram below shows the substitution of S- for a nonbridging phosphate oxygen, generating a PS linkage in lieu of a phosphodiester linkage:

[chemical structure]

### Inverted Abasic Modifications

[1218] Abasic nucleotides refer to those which lack nitrogenous bases. The figure below depicts an oligonucleotide with an abasic (in this case, shown as apurinic; an abasic site could also be an apyrimidinic site, wherein the description of the abasic site is typically in reference to Watson-Crick base pairing—e.g., an apurinic site refers to a site that lacks a nitrogenous base and would typically base pair with a pyrimidinic site) site that lacks a base, wherein the base may be substituted by another moiety at the 1′ position of the furan ring (e.g., a hydroxyl group, as shown below, to form a ribose or deoxyribose site, as shown below, or a hydrogen):

[chemical structure]

[1219] Inverted bases refer to those with linkages that are inverted from the normal 5′ to 3′ linkage (i.e., either a 5′ to 5′ linkage or a 3′ to 3′ linkage). For example:

[chemical structure]

[1220] An abasic nucleotide can be attached with an inverted linkage. For example, an abasic nucleotide may be attached to the terminal 5′ nucleotide via a 5′ to 5′ linkage, or an abasic nucleotide may be attached to the terminal 3′ nucleotide via a 3′ to 3′ linkage. An inverted abasic nucleotide at either the terminal 5′ or 3′ nucleotide may also be called an inverted abasic end cap. In this application, the terms “invd” indicates an inverted abasic nucleotide linkage.

### Deoxyribonucleotides

[1221] A deoxyribonucleotide (in which the sugar comprises a 2′-deoxy position) is considered a modification in the context of a gRNA, in that the nucleotide is modified relative to standard RNA by the substitution of a proton for a hydroxyl at the 2′ position. Unless otherwise indicated, a deoxyribonucleotide modification at a position that is U in an unmodified RNA can also comprise replacement of the U nucleobase with a T.

### Bicyclic Ribose Analog

[1222] Exemplary bicyclic ribose analogs include locked nucleic acid (LNA), ENA, bridged nucleic acid (BNA), or another LNA-like modifications. In some instances, a bicyclic ribose analog has 2′ and 4′ positions connected through a linker. The linker can be of the formula —X—(CH₂)ₙ— where n is 1 or 2; X is O, NR, or S; and R is H or C₁₋₃ alkyl, e.g., methyl. Examples of bicyclic ribose analogs include LNAs comprising a 2′-O—CH₂-4′ bicyclic structure (oxy-LNA) (see WO 98/39352 and WO 99/14226); 2′-NH—CH₂-4′ or 2′-N(CH₃)—CH₂-4′ (amino-LNAs) (Singh et al., J. Org. Chem. 63:10035-10039 (1998); Singh et al., J. Org. Chem. 63:6078-6079 (1998)); and 2′-S—CH₂-4′ (thio-LNA) (Singh et al., J. Org. Chem. 63:6078-6079 (1998); Kumar et al., Biorg. Med. Chem. Lett. 8:2219-2222 (1998)).

### ENA

[1223] An ENA modification refers to a nucleotide comprising a 2′-O,4′-C-ethylene modification. An exemplary structure of an ENA nucleotide is shown below, in which wavy lines indicate connections to the adjacent nucleotides (or terminal positions as the case may be, with the understanding that if the 3′ terminal nucleotide is an ENA nucleotide, the 3′ position may comprise a hydroxyl rather than phosphate). For further discussion of ENA nucleotides, see, e.g., Koizumi et al., Nucleic Acids Res. 31: 3267-3273 (2003).

[chemical structure]

### UNA

[1224] A UNA or unlocked nucleic acid modification refers to a nucleotide comprising a 2′,3′-seco-RNA modification, in which the 2′ and 3′ carbons are not bonded directly to each other. An exemplary structure of a UNA nucleotide is shown below, in which wavy lines indicate connections to the adjacent phosphates or modifications replacing phosphates (or terminal positions as the case may be). For further discussion of UNA nucleotides, see, e.g., Snead et al., Molecular Therapy 2: e103, doi:10.1038/mtna.2013.36 (2013).

[chemical structure]

### Base Modifications

[1225] A base modification is any modification that alters the structure of a nucleobase or its bond to the backbone, including isomerization (as in pseudouridine). In some embodiments, a base modification includes inosine. In some embodiments, a modification comprises a base modification that reduces RNA endonuclease activity, e.g., by interfering with recognition of a cleavage site by an RNase and/or by stabilizing an RNA structure (e.g., secondary structure) that decreases accessibility of a cleavage site to an RNase. Exemplary base modifications that can stabilize RNA structures are pseudouridine and 5-methylcytosine. See Peacock et al., J Org Chem. 76: 7295-7300 (2011). In some embodiments, a base modification can increase or decrease the melting temperature (Tm) of a nucleic acid, e.g., by increasing the hydrogen bonding in a Watson-Crick base pair, forming non-canonical base pair, or creating a mismatched base pair.

[1226] The above modifications and their equivalents are included within the scope of the embodiments described herein.

### YA Modifications

[1227] A modification at a YA site (also referred to as a YA modification) can be a modification of the internucleoside linkage, a modification of the base (pyrimidine or adenine), e.g. by chemical modification, substitution, or otherwise, and/or a modification of the sugar (e.g. at the 2′ position, such as 2′-O-alkyl, 2′-F, 2′-moe, 2′-F arabinose, 2′-H (deoxyribose), and the like). In some embodiments, a “YA modification” is any modification that alters the structure of the dinucleotide motif to reduce RNA endonuclease activity, e.g., by interfering with recognition or cleavage of a YA site by an RNase and/or by stabilizing an RNA structure (e.g., secondary structure) that decreases accessibility of a cleavage site to an RNase. See Peacock et al., J Org Chem. 76: 7295-7300 (2011); Behlke, Oligonucleotides 18:305-320 (2008); Ku et al., Adv. Drug Delivery Reviews 104: 16-28 (2016); Ghidini et al., Chem. Commun., 2013, 49, 9036. Peacock et al., Belhke, Ku, and Ghidini provide exemplary modifications suitable as YA modifications. Modifications known to those of skill in the art to reduce endonucleolytic degradation are encompassed. Exemplary 2′ ribose modifications that affect the 2′ hydroxyl group involved in RNase cleavage are 2′-H and 2′-O-alkyl, including 2′-O-Me. Modifications such as bicyclic ribose analogs, UNA, and modified internucleoside linkages of the residues at the YA site can be YA modifications. Exemplary base modifications that can stabilize RNA structures are pseudouridine and 5-methylcytosine. In some embodiments, at least one nucleotide of the YA site is modified. In some embodiments, the pyrimidine (also called “pyrimidine position”) of the YA site comprises a modification (which includes a modification altering the internucleoside linkage immediately 3′ of the sugar of the pyrimidine, a modification of the pyrimidine base, and a modification of the ribose, e.g. at its 2′ position). In some embodiments, the adenine (also called “adenine position”) of the YA site comprises a modification (which includes a modification altering the internucleoside linkage immediately 3′ of the sugar of the pyrimidine, a modification of the pyrimidine base, and a modification of the ribose, e.g. at its 2′ position). In some embodiments, the pyrimidine and the adenine of the YA site comprise modifications. In some embodiments, the YA modification reduces RNA endonuclease activity.

[1228] The above modifications and their equivalents are included within the scope of the embodiments described herein.

Domains/regions of sgRNAs

[1229] Briner A E et al., Molecular Cell 56:333-339 (2014) describes functional domains of sgRNAs, referred to herein as “domains”, including the “spacer” domain responsible for targeting, the “lower stem”, the “bulge”, “upper stem” (which may include a tetraloop), the “nexus”, and the “hairpin 1” and “hairpin 2” domains. See, Briner et al. at page 334, FIG. 1A.

[1230] Table 3 provides a schematic of the domains of an sgRNA as used herein. In Table 3, the “n” between regions represents a variable number of nucleotides, for example, from 0 to 1, 2, 3, 4, 5, 6, 7, 8, 9, 10, 11, 12, 13, 14, 15, 16, 17, 18, 19, 20, or more. In some embodiments, n equals 0. In some embodiments, n equals 1.

[1231] 5′ Terminus Region

[1232] In some embodiments, the sgRNA or short-sgRNA comprises nucleotides at the 5′ terminus as shown in Table 3. In some embodiments, the 5′ terminus of the sgRNA or short-sgRNA comprises a spacer or guide region that functions to direct a Cas protein, e.g., a Cas9 protein, to a target nucleotide sequence. In some embodiments, the 5′ terminus does not comprise a guide region. In some embodiments, the 5′ terminus comprises a spacer and additional nucleotides that do not function to direct a Cas protein to a target nucleotide region.

[1233] Lower Stem

[1234] In some embodiments, the sgRNA or short-sgRNA comprises a lower stem (LS) region that when viewed linearly, is separated by a bulge and upper stem regions. See Table 3.

[1235] In some embodiments, the lower stem regions comprise 1-12 nucleotides, e.g. in one embodiment the lower stem regions comprise LS1-LS12. In some embodiments, the lower stem region comprises fewer nucleotides than shown in Table 3. In some embodiments, the lower stem region comprises more nucleotides than shown in Table 3. When the lower stem region comprises fewer or more nucleotides than shown in the schematic of Table 3, the modification pattern, as will be apparent to the skilled artisan, should be maintained.

[1236] In some embodiments, the lower stem region has nucleotides that are complementary in nucleic acid sequence when read in opposite directions. In some embodiments, the complementarity in nucleic acid sequence of lower stem leads to a secondary structure of a stem in the sgRNA or short-sgRNA (e.g., the regions may base pair with one another). In some embodiments, the lower stem regions may not be perfectly complimentary to each other when read in opposite directions.

[1237] Bulge

[1238] In some embodiments, the sgRNA or short-sgRNA comprises a bulge region comprising six nucleotides, B1-B6. When viewed linearly, the bulge region is separated into two regions. See Table 3. In some embodiments, the bulge region comprises six nucleotides, wherein the first two nucleotides are followed by an upper stem region, followed by the last four nucleotides of the bulge. In some embodiments, the bulge region comprises fewer nucleotides than shown in Table 3. In some embodiments, the bulge region comprises more nucleotides than shown in Table 3. When the bulge region comprises fewer or more nucleotides than shown in the schematic of Table 3, the modification pattern, as will be apparent to the skilled artisan, should be maintained.

[1239] In some embodiments, the presence of a bulge results in a directional kink between the upper and lower stem modules in an sgRNA or short-sgRNA.

[1240] Upper Stem

[1241] In some embodiments, the sgRNA or short-sgRNA comprises an upper stem region comprising 12 nucleotides. In some embodiments, the upper stem region comprises a loop sequence. In some instances, the loop is a tetraloop (loop consisting of four nucleotides).

[1242] In some embodiments, the upper stem region comprises fewer nucleotides than shown in Table 3. In some embodiments, the upper stem region comprises more nucleotides than shown in Table 3. When the upper stem region comprises fewer or more nucleotides than shown in the schematic of Table 3, the modification pattern, as will be apparent to the skilled artisan, should be maintained.

[1243] In some embodiments, the upper stem region has nucleotides that are complementary in nucleic acid sequence when read in opposite directions. In some embodiments, the complementarity in nucleic acid sequence of upper stem leads to a secondary structure of a stem in the sgRNA or short-sgRNA (e.g., the regions may base pair with one another). In some embodiments, the upper stem regions may not be perfectly complimentary to each other when read in opposite directions.

[1244] Nexus

[1245] In some embodiments, the sgRNA or short-sgRNA comprises a nexus region that is located between the lower stem region and the hairpin 1 region. In some embodiments, the nexus comprises 18 nucleotides. In some embodiments, the nexus region comprises nucleotides N1 through N18 as shown in Table 3.

[1246] In some embodiments, the nexus region comprises fewer nucleotides than shown in Table 3. In some embodiments, the nexus region comprises more nucleotides than shown in Table 3. When the nexus region comprises fewer or more nucleotides than shown in the schematic of Table 3, the modification pattern, as will be apparent to the skilled artisan, should be maintained.

[1247] In some embodiments, the nexus region has nucleotides that are complementary in nucleic acid sequence when read in opposite directions. In some embodiments, the complementarity in nucleic acid sequence leads to a secondary structure of a stem and/or stem loop in the sgRNA or short-sgRNA (e.g., certain nucleotides in the nexus region may base pair with one another). In some embodiments, the nexus regions may not be perfectly complimentary to each other when read in opposite directions.

[1248] Hairpin

[1249] In some embodiments, the sgRNA or short-sgRNA comprises one or more hairpin regions. In some embodiments, the hairpin region is downstream of (e.g., 3′ to) the nexus region. In some embodiments, the region of nucleotides immediately downstream of the nexus region is termed “hairpin 1” or “H1”. In some embodiments, the region of nucleotides 3′ to hairpin 1 is termed “hairpin 2” or “H2”. In some embodiments, the hairpin region comprises both hairpin 1 and hairpin 2. In some embodiments, the sgRNA or short-sgRNA comprises hairpin 1 or hairpin 2.

[1250] In some embodiments, the hairpin 1 region comprises 12 nucleic acids immediately downstream of the nexus region. In some embodiments, the hairpin 1 region comprises nucleotides H1-1 through H1-12 as shown in Table 3.

[1251] In some embodiments, the hairpin 2 region comprises 15 nucleic acids downstream of the hairpin 1 region. In some embodiments, the hairpin 2 region comprises nucleotides H2-1 through H2-15 as shown in Table 3.

[1252] In some embodiments, one or more nucleotides is present between the hairpin 1 and the hairpin 2 regions. The one or more nucleotides between the hairpin 1 and hairpin 2 region may be modified or unmodified. In some embodiments, hairpin 1 and hairpin 2 are separated by one nucleotide. In some embodiments, the hairpin regions comprise fewer nucleotides than shown in Table 3. In some embodiments, the hairpin regions comprise more nucleotides than shown in Table 3. When a hairpin region comprises fewer or more nucleotides than shown in the schematic of Table 3, the modification pattern, as will be apparent to the skilled artisan, should be maintained.

[1253] In some embodiments, a hairpin region has nucleotides that are complementary in nucleic acid sequence when read in opposite directions. In some embodiments, the hairpin regions may not be perfectly complimentary to each other when read in opposite directions (e.g., the top or loop of the hairpin comprises unpaired nucleotides).

[1254] In some embodiments, the sgRNA or short-sgRNA comprises replacement of hairpin 1 with nucleotides “n”, wherein “n” is an integer between 1 and 50, 40, 30, 20, 15, 10, 5, 4, 3, and 2. In some embodiments, the hairpin 1 region of an sgRNA is replaced by 2 nucleotides.

[1255] 3′ Terminus

[1256] The sgRNA or short-sgRNA has a 3′ end, which is the last nucleotide of the sgRNA. The 3′ terminus region includes the last 1-7 nucleotides from the 3′ end. In some embodiments, the 3′ end is the end of hairpin 2. In some embodiments, the sgRNA comprises nucleotides after the hairpin region(s). In some embodiments, the sgRNA includes a 3′ tail region, in which case the last nucleotide of the 3′ tail is the 3′ terminus. In some embodiments, the 3′ tail comprises 1, 2, 3, 4, 5, 6, 7, 8, 9, 10, 15 or 20 or more nucleotides, e.g. that are not associated with the secondary structure of a hairpin. In some embodiments, the 3′ tail region comprises 1, 2, 3, or 4 nucleotides that are not associated with the secondary structure of a hairpin. In some embodiments, the 3′ tail region comprises 4 nucleotides that are not associated with the secondary structure of a hairpin. In some embodiments, the 3′ tail region comprises 1, 2, or 3 nucleotides that are not associated with the secondary structure of a hairpin.

TABLE 2
(Conserved Portion of a spyCas9 sgRNA; SEQ ID NO: 400)

| 1 | 2 | 3 | 4 | 5 | 6 | 7 | 8 | 9 | 10 | 11 | 12 | 13 | 14 | 15 | 16 | 17 | 18 | 19 | 20 | 21 | 22 | 23 | 24 |
|---|---|---|---|---|---|---|---|---|---|---|---|---|---|---|---|---|---|---|---|---|---|---|---|
| G | U | U | U | U | A | G | A | G | C | U | A | G | A | A | A | U | A | G | C | A | A | G | U |

| | | | |
|---|---|---|---|
| LS1-LS6 | B1-B2 | US1-US12 | B2-B6 |

| 25 | 26 | 27 | 28 | 29 | 30 | 31 | 32 | 33 | 34 | 35 | 36 | 37 | 38 | 39 | 40 | 41 | 42 | 43 | 44 | 45 | 46 | 47 | 48 |
|---|---|---|---|---|---|---|---|---|---|---|---|---|---|---|---|---|---|---|---|---|---|---|---|
| U | A | A | A | A | U | A | A | G | G | C | U | A | G | U | C | C | G | U | U | A | U | C | A |

| | | | | | | Nexus | | | | | | | | | | | | | | | | | | | | | |
|---|---|---|---|---|---|---|---|---|---|---|---|---|---|---|---|---|---|---|---|---|---|---|---|---|---|---|---|
| 49 | 50 | 51 | 52 | 53 | 54 | 55 | 56 | 57 | 58 | 59 | 60 | 61 | 62 | 63 | 64 | 65 | 66 | 67 | 68 | 69 | 70 | 71 | 72 | 73 | 74 | 75 | 76 |
| A | C | U | U | G | A | A | A | A | A | G | U | G | G | C | A | C | C | G | A | G | U | C | G | G | U | G | C |

| | | |
|---|---|---|
| H1-1 through H1-12 | N | H2-1 through H2-15 |

TABLE 3
(Regions of sgRNA (linear view, 5′ to 3′)

| | LS1-6 | | B1-2 | | US1-12 | | B3-6 | |
|---|---|---|---|---|---|---|---|---|
| 5′ terminus (n) | lower stem | n | bulge | n | upper stem | n | bulge | n |

| LS7-12 | | N1-18 | | H1-1 thru H1-12 | | H2-1 thru H2-15 | |
|---|---|---|---|---|---|---|---|
| lower stem | n | nexus | n | hairpin 1 | n | hairpin 2 | 3′ terminus |

gRNAs comprising Modifications, including Modifications of YA Sites

[1257] In some embodiments, a gRNA (e.g., sgRNA, short-sgRNA, dgRNA, or crRNA) described herein comprises modifications at 1, 2, 3, 4, 5, 6, 7, 8, 9, 10, 11, 12, 13, 14, 15, 16, or more YA sites (e.g., in the conserved region and/or the guide region) and/or a modification, such as a YA modification, at one or more nucleotides located at or after nucleotide 6 from the 5′ end of the 5′ terminus. In some embodiments, the pyrimidine of the YA site comprises a modification (which includes a modification altering the internucleoside linkage immediately 3′ of the sugar of the pyrimidine). In some embodiments, the adenine of the YA site comprises a modification (which includes a modification altering the internucleoside linkage immediately 3′ of the sugar of the adenine). In some embodiments, the pyrimidine and the adenine of the YA site comprise modifications, such as sugar, base, or internucleoside linkage modifications. The YA modifications can be any of the types of modifications set forth herein. In some embodiments, the YA modifications comprise one or more of phosphorothioate, 2′-OMe, or 2′-fluoro. In some embodiments, the YA modifications comprise pyrimidine modifications comprising one or more of phosphorothioate, 2′-OMe, or 2′-fluoro. In some embodiments, the YA modification comprises a bicyclic ribose analog (e.g., an LNA, BNA, or ENA) within an RNA duplex region that contains one or more YA sites. In some embodiments, the YA modification comprises a bicyclic ribose analog (e.g., an LNA, BNA, or ENA) within an RNA duplex region that contains a YA site, wherein the YA modification is distal to the YA site.

[1258] Any of the embodiments described above may be combined with the following: (i) at least one of nucleotides 8-11, 13, 14, 17, or 18 from the 5′ end of the 5′ terminus does not comprise a 2′-fluoro modification, and/or (ii) at least one of nucleotides 6-10 from the 5′ end of the 5′ terminus does not comprise a phosphorothioate linkage; and (i) at least one of nucleotides 7-10 from the 5′ end of the 5′ terminus does not comprise a 2′-OMe modification, (ii) nucleotide 20 from the 5′ end of the 5′ terminus does not comprise a 2′-OMe modification, and/or (iii) or the guide RNA comprises a 2′-fluoro modification at any one or more of nucleotides 1-20 from the 5′ end of the 5′ terminus and at least one of nucleotides 11, 12, 13, 14, 17, or 18 from the 5′ end of the 5′ terminus does not comprise a 2′-fluoro modification, optionally wherein nucleotide 12 from the 5′ end of the 5′ terminus does not comprise a 2′-fluoro modification. Such embodiments may be further, or alternatively, combined with any other one or more embodiments described herein to the extent feasible.

[1259] Guide Region Modifications including YA Site Modifications

[1260] In some embodiments, the guide region comprises one or more modifications, optionally including YA site modifications. In some embodiments, the guide region comprises 1, 2, 3, 4, 5, or more YA sites (“guide region YA sites”) that may comprise YA modifications. In some embodiments, one or more YA sites located at 5-end, 6-end, 7-end, 8-end, 9-end, or 10-end from the 5′ end of the 5′ terminus (where “5-end”, etc., refers to position 5 to the 3′ end of the guide region, i.e., the most 3′ nucleotide in the guide region) comprise YA modifications. In some embodiments, two or more YA sites located at 5-end, 6-end, 7-end, 8-end, 9-end, or 10-end from the 5′ end of the 5′ terminus comprise YA modifications. In some embodiments, three or more YA sites located at 5-end, 6-end, 7-end, 8-end, 9-end, or 10-end from the 5′ end of the 5′ terminus comprise YA modifications. In some embodiments, four or more YA sites located at 5-end, 6-end, 7-end, 8-end, 9-end, or 10-end from the 5′ end of the 5′ terminus comprise YA modifications. In some embodiments, five or more YA sites located at 5-end, 6-end, 7-end, 8-end, 9-end, or 10-end from the 5′ end of the 5′ terminus comprise YA modifications. A modified guide region YA site comprises a YA modification.

[1261] In some embodiments, a modified guide region YA site is within 17, 16, 15, 14, 13, 12, 11, 10, or 9 nucleotides of the 3′ terminal nucleotide of the guide region. For example, if a modified guide region YA site is within 10 nucleotides of the 3′ terminal nucleotide of the guide region and the guide region is 20 nucleotides long, then the modified nucleotide of the modified guide region YA site is located at any of positions 11-20. In some embodiments, a YA modification is located within a YA site 20, 19, 18, 17, 16, 15, 14, 13, 12, 11, 10, 9, 8, 7, 6, 5, 4, 3, 2, or 1 nucleotides from the 3′ terminal nucleotide of the guide region. In some embodiments, a YA modification is located 20, 19, 18, 17, 16, 15, 14, 13, 12, 11, 10, 9, 8, 7, 6, 5, 4, 3, 2, or 1 nucleotides from the 3′ terminal nucleotide of the guide region.

[1262] In some embodiments, a modified guide region YA site is at or after nucleotide 4, 5, 6, 7, 8, 9, 10, or 11 from the 5′ end of the 5′ terminus.

[1263] In some embodiments, a modified guide region YA site is other than a 5′ end modification. For example, a gRNA can comprise a 5′ end modification as described herein and further comprise a modified guide region YA site. Alternatively, a gRNA can comprise an unmodified 5′ end and a modified guide region YA site. Alternatively, a gRNA can comprise a modified 5′ end and an unmodified guide region YA site.

[1264] In some embodiments, a modified guide region YA site comprises a modification that at least one nucleotide located 5′ of the guide region YA site does not comprise. For example, if nucleotides 1-3 comprise phosphorothioates, nucleotide 4 comprises only a 2′-OMe modification, and nucleotide 5 is the pyrimidine of a YA site and comprises a phosphorothioate, then the modified guide region YA site comprises a modification (phosphorothioate) that at least one nucleotide located 5′ of the guide region YA site (nucleotide 4) does not comprise. In another example, if nucleotides 1-3 comprise phosphorothioates, and nucleotide 4 is the pyrimidine of a YA site and comprises a 2′-OMe, then the modified guide region YA site comprises a modification (2′-OMe) that at least one nucleotide located 5′ of the guide region YA site (any of nucleotides 1-3) does not comprise. This condition is also always satisfied if an unmodified nucleotide is located 5′ of the modified guide region YA site.

[1265] In some embodiments, the guide region comprises modifications at 1-14 of nucleotides 1, 2, 3, 4, 6, 7, 8, 9, 10, 11, 13, 14, 17, and 18 of the guide region. Such modifications may be 2′-OMe, 2′-fluoro, 2′-H, inosine, or phosphorothioate modifications, or a combination thereof. For example, 2′-OMe modifications may be included at any or all of nucleotides 1-4 and 12; phosphorothioate modifications may be included at any or all of nucleotides 1-3 and 6-10; and/or 2′-fluoro modifications may be included at any or all of nucleotides 8-11, 13, 14, 17, and 18. In negative terms, 2′-OMe modifications may be excluded from nucleotides 6-11 and 13-end; 2′-fluoro modifications may be excluded from nucleotides 1-7, 15, 16, and 20 (if present); and/or phosphorothioate modifications may be excluded from nucleotides 4, 5, 11-14, 17, and 18. In some embodiments, nucleotides are modified in a YA-site dependent manner, e.g., if a YA site is present at any of nucleotides 5-6, 12-13, 15-16, 16-17, or 19-20, then at least one nucleotide of the YA site is modified, e.g., at least the pyrimidine of the YA site is modified, optionally wherein the nucleotides at positions 5, 12, 15, 16, and 19 are unmodified if they are not the pyrimidine of a YA site. In some embodiments, the modification at nucleotide 5 when it is the pyrimidine of a YA site is 2′-OMe; the modification at nucleotide 12 when it is the pyrimidine of a YA site is 2′-OMe; the modification at nucleotide 15 when it is the pyrimidine of a YA site is phosphorothioate; the modification at nucleotide 16 when it is the pyrimidine of a YA site is phosphorothioate; and/or the modification at nucleotide 19 when it is the pyrimidine of a YA site is phosphorothioate. Recognizing that YA sites cannot be present at both positions 15-16 and 16-17, it is thus possible for there to be up to four modifications contingent on the presence of YA sites. In an alternative embodiment, the modification at nucleotide 19 may instead be a 2′-fluoro. This can be present in a YA site-dependent manner or it can be present regardless of whether there is a YA site at positions 19-20. In some embodiments, nucleotide 15 and 16 are unmodified or modified only with a phosphorothioate, e.g., only at a nucleotide which is the pyrimidine of a YA site located at nucleotides 15-16 or 16-17. In some embodiments, nucleotides 15 and 16 comprise unmodified riboses and/or unmodified nucleobases. In some embodiments, nucleotide 5 is unmodified or is modified only with 2′-OMe if it is the pyrimidine of a YA site. In some embodiments, nucleotide 12 is unmodified or is modified only with 2′-OMe if it is the pyrimidine of a YA site. In some embodiments, nucleotide 20 (or the 3′-terminal nucleotide of the guide region) is unmodified. In any of the foregoing embodiments, the guide region may consist of 20 nucleotides.

[1266] In some embodiments, a gRNA comprises a guide region that comprises a modification at one or more of nucleotide 5 and/or 12. The modifications at nucleotide 5 and/or 12 may be independently selected from modifications described herein, e.g., 2′-OMe, 2′-F, phosphorothioate, and 2′-H (a deoxyribonucleotide). Such modifications may be combined with another modification pattern or nucleotide modifications described herein, e.g., as shown in a gRNA described herein. Particular examples of such embodiments are described herein, e.g., in certain numbered embodiments set forth above and in modification patterns represented by sequences in the Table of Sequences. In some embodiments, such a modification is combined with one or more, or all, of 2′-OMe modifications at nucleotides 1-4, phosphorothioate modifications at nucleotides 1-3 and 6-10, and/or 2′-F modifications at nucleotides 8-11, 13, 14, 17, and 18.

[1267] In some embodiments, a gRNA comprises a guide region that comprises modifications at any one, two, or all of nucleotides 8-10. Such modifications may be combined with another modification pattern or nucleotide modifications described herein, e.g., as shown in a gRNA described herein. The modifications may be independently selected from modifications described herein, e.g., 2′-F modifications and phosphorothioate modifications, or a combination thereof. In some embodiments, any one, two, or all of nucleotides 8-10 comprise 2′-F modifications. In some embodiments, any one, two, or all of nucleotides 8-10 comprise 2′-F modifications but not phosphorothioate modifications. In some embodiments, any one, two, or all of nucleotides 8-10 comprise 2′-F modifications and phosphorothioate modifications. Particular examples of such embodiments are described herein, e.g., in certain numbered embodiments set forth above and in modification patterns represented by sequences in the Table of Sequences. In some embodiments, such a modification is combined with one or more, or all, of 2′-OMe modifications at nucleotides 1-4, phosphorothioate modifications at nucleotides 1-3 and 6-7, and/or 2′-F modifications at nucleotides 11, 13, 14, 17, and 18.

[1268] In some embodiments, a gRNA comprises a guide region that comprises modifications at any one or both of nucleotides 5 and 6. The modifications may be independently selected from modifications described herein, e.g., 2′-F modifications and phosphorothioate modifications, or a combination thereof. In some embodiments, any one or both of nucleotides 5 and 6 comprise 2′-F modifications. In some embodiments, any one or both of nucleotides 5 and 6 comprise 2′-F modifications but not phosphorothioate modifications. In some embodiments, any one or both of nucleotides 5 and 6 comprise 2′-F modifications and phosphorothioate modifications. Particular examples of such embodiments are described herein, e.g., in certain numbered embodiments set forth above and in modification patterns represented by sequences in the Table of Sequences. In some embodiments, such a modification is combined with one or more, or all, of 2′-OMe modifications at nucleotides 1-4, phosphorothioate modifications at nucleotides 1-3 and 7-10, and/or 2′-F modifications at nucleotides 8-11, 13, 14, 17, and 18.

[1269] In some embodiments, a gRNA comprises a guide region that comprises modifications at at least 1, 2, 3, 4, 5, or 6 of nucleotides 6-11. The modifications may be independently selected from modifications described herein, e.g., 2′-F modifications. In some embodiments, 2′-F modifications at 1, 2, 3, 4, 5, or 6 of nucleotides 6-11 are combined with another compatible modification, such as a phosphorothioate modification, at one or more of the positions comprising a 2′-F modification. Particular examples of such embodiments are described herein, e.g., in certain numbered embodiments set forth above and in modification patterns represented by sequences in the Table of Sequences. In some embodiments, such a modification is combined with one or more, or all, of 2′-OMe modifications at nucleotides 1-4, phosphorothioate modifications at nucleotides 1-3, and/or 2′-F modifications at nucleotides 13, 14, 17, and 18.

[1270] In some embodiments, a gRNA comprises a guide region that comprises modifications at at least 1, 2, 3, 4, 5, 6, 7, 8, 9, or 10 of nucleotides 1-4 and 6-11. The modifications may be independently selected from modifications described herein, e.g., 2′-F modifications. In some embodiments, 2′-F modifications at 1, 2, 3, 4, 5, 6, 7, 8, 9, or 10 of nucleotides 1-4 and 6-11 are combined with another compatible modification, such as a phosphorothioate modification, at one or more of the positions comprising a 2′-F modification. Particular examples of such embodiments are described herein, e.g., in certain numbered embodiments set forth above and in modification patterns represented by sequences in the Table of Sequences. In some embodiments, such a modification is combined with one or more, or all, of phosphorothioate modifications at nucleotides 1-3 and/or 2′-F modifications at nucleotides 13, 14, 17, and 18.

[1271] In some embodiments, a gRNA comprises a guide region that comprises 2′-OMe modifications at at least 1, 2, 3, or 4 of nucleotides 9, 11, 13, and 14. In some embodiments, 2′-OMe modifications at at least 1, 2, 3, or 4 of nucleotides 9, 11, 13, and 14 are combined with another compatible modification, such as a phosphorothioate modification, at one or more of the positions comprising a 2′-OMe modification. Particular examples of such embodiments are described herein, e.g., in certain numbered embodiments set forth above and in modification patterns represented by sequences in the Table of Sequences. In some embodiments, such a modification is combined with one or more, or all, of 2′-OMe modifications at nucleotides 1-4 and/or phosphorothioate modifications at nucleotides 1-3 and 6-10.

[1272] In some embodiments, the modified guide region YA sites comprise modifications as described for YA sites above.

[1273] Additional embodiments of guide region YA site modifications are set forth in the summary above. Any embodiments set forth elsewhere in this disclosure may be combined to the extent feasible with any of the foregoing embodiments.

[1274] Conserved Region YA Site Modifications

[1275] Conserved region YA sites 1-10 are illustrated in FIG. 1B. In some embodiments, 1, 2, 3, 4, 5, 6, 7, 8, 9, or 10 conserved region YA sites comprise modifications.

[1276] In some embodiments, conserved region YA sites 1, 8, or 1 and 8 comprise YA modifications. In some embodiments, conserved region YA sites 1, 2, 3, 4, and 10 comprise YA modifications. In some embodiments, YA sites 2, 3, 4, 8, and 10 comprise YA modifications. In some embodiments, conserved region YA sites 1, 2, 3, and 10 comprise YA modifications. In some embodiments, YA sites 2, 3, 8, and 10 comprise YA modifications. In some embodiments, YA sites 1, 2, 3, 4, 8, and 10 comprise YA modifications. In some embodiments, 1, 2, 3, 4, 5, 6, 7, or 8 additional conserved region YA sites comprise YA modifications.

[1277] In some embodiments, 1, 2, 3, or 4 of conserved region YA sites 2, 3, 4, and 10 comprise YA modifications. In some embodiments, 1, 2, 3, 4, 5, 6, 7, or 8 additional conserved region YA sites comprise YA modifications.

[1278] In some embodiments, the modified conserved region YA sites comprise modifications as described for YA sites above.

[1279] Additional embodiments of conserved region YA site modifications are set forth in the summary above. Any embodiments set forth elsewhere in this disclosure may be combined to the extent feasible with any of the foregoing embodiments.

### Modifications to Terminal Nucleotides

[1280] In some embodiments, the 5′ and/or 3′ terminus regions of a gRNA (e.g., sgRNA, short-sgRNA, dgRNA, or crRNA) are modified.

[1281] 3′ Terminus Region Modifications

[1282] In some embodiments, the terminal (i.e., last) 1, 2, 3, 4, 5, 6, or 7 nucleotides in the 3′ terminus region are modified. Throughout, this modification may be referred to as a “3′ end modification”. In some embodiments, the terminal (i.e., last) 1, 2, 3, 4, 5, 6, or 7 nucleotides in the 3′ terminus region comprise more than one modification. In some embodiments, at least one of the terminal (i.e., last) 1, 2, 3, 4, 5, 6, or 7 nucleotides in the 3′ terminus region are modified. In some embodiments, at least two of the terminal (i.e., last) 1, 2, 3, 4, 5, 6, or 7 nucleotides in the 3′ terminus region are modified. In some embodiments, at least three of the terminal (i.e., last) 1, 2, 3, 4, 5, 6, or 7 nucleotides in the 3′ terminus region are modified. In some embodiments, the modification comprises a PS linkage. In some embodiments, the modification to the 3′ terminus region is a 3′ protective end modification. In some embodiments, the 3′ end modification comprises a 3′ protective end modification.

[1283] In some embodiments, the 3′ end modification comprises a modified nucleotide selected from 2′-O-methyl (2′-O-Me) modified nucleotide, 2′-O-(2-methoxyethyl) (2′-O-moe) modified nucleotide, a 2′-fluoro (2′-F) modified nucleotide, a phosphorothioate (PS) linkage between nucleotides, an inverted abasic modified nucleotide, an ENA, a UNA, a 2′-H (DNA), or combinations thereof.

[1284] In some embodiments, the 3′ end modification comprises or further comprises a 2′-O-methyl (2′-O-Me) modified nucleotide.

[1285] In some embodiments, the 3′ end modification comprises or further comprises a 2′-fluoro (2′-F) modified nucleotide.

[1286] In some embodiments, the 3′ end modification comprises or further comprises a phosphorothioate (PS) linkage between nucleotides.

[1287] In some embodiments, the 3′ end modification comprises or further comprises an inverted abasic modified nucleotide.

[1288] In some embodiments, the 3′ end modification comprises or further comprises an ENA.

[1289] In some embodiments, the 3′ end modification comprises or further comprises a UNA.

[1290] In some embodiments, the 3′ end modification comprises or further comprises a 2′-H (DNA).

[1291] In some embodiments, the 3′ end modification comprises or further comprises a modification of any one or more of the last 7, 6, 5, 4, 3, 2, or 1 nucleotides. In some embodiments, the 3′ end modification comprises or further comprises one modified nucleotide. In some embodiments, the 3′ end modification comprises or further comprises two modified nucleotides. In some embodiments, the 3′ end modification comprises or further comprises three modified nucleotides. In some embodiments, the 3′ end modification comprises or further comprises four modified nucleotides. In some embodiments, the 3′ end modification comprises or further comprises five modified nucleotides. In some embodiments, the 3′ end modification comprises or further comprises six modified nucleotides. In some embodiments, the 3′ end modification comprises or further comprises seven modified nucleotides.

[1292] In some embodiments, the 3′ end modification comprises or further comprises a modification of between 1 and 7 or between 1 and 5 nucleotides.

[1293] In some embodiments, the 3′ end modification comprises or further comprises modifications of 1, 2, 3, 4, 5, 6, or 7 nucleotides at the 3′ terminus of the gRNA.

[1294] In some embodiments, the 3′ end modification comprises or further comprises modifications of about 1-3, 1-5, 1-6, or 1-7 nucleotides at the 3′ terminus of the gRNA.

[1295] In some embodiments, the 3′ end modification comprises or further comprises any one or more of the following: a phosphorothioate (PS) linkage between nucleotides, a 2′-O-Me modified nucleotide, a 2′-O-moe modified nucleotide, a 2′-F modified nucleotide, an inverted abasic modified nucleotide, an ENA, a UNA, and a combination thereof.

[1296] In some embodiments, the 3′ end modification comprises or further comprises 1, 2, 3, 4, 5, 6, or 7 PS linkages between nucleotides.

[1297] In some embodiments, the 3′ end modification comprises or further comprises at least one 2′-O-Me, 2′-O-moe, inverted abasic, or 2′-F modified nucleotide.

[1298] In some embodiments, the 3′ end modification comprises or further comprises one PS linkage, wherein the linkage is between the last and second to last nucleotide. In some embodiments, the 3′ end modification comprises or further comprises two PS linkages between the last three nucleotides. In some embodiments, the 3′ end modification comprises or further comprises four PS linkages between the last four nucleotides.

[1299] In some embodiments, the 3′ end modification comprises or further comprises PS linkages between any one or more of the last four nucleotides. In some embodiments, the 3′ end modification comprises or further comprises PS linkages between any one or more of the last five nucleotides. In some embodiments, the 3′ end modification comprises or further comprises PS linkages between any one or more of the last 2, 3, 4, 5, 6, or 7 nucleotides.

[1300] In some embodiments, the 3′ end modification comprises or further comprises a modification of one or more of the last 1-7 nucleotides, wherein the modification is a PS linkage, inverted abasic nucleotide, 2′-O-Me, 2′-O-moe, 2′-F, or combinations thereof.

[1301] In some embodiments, the 3′ end modification comprises or further comprises a modification to the last nucleotide with 2′-O-Me, 2′-O-moe, 2′-F, or combinations thereof, and an optionally one or two PS linkages to the next nucleotide and/or the first nucleotide of the 3′ tail.

[1302] In some embodiments, the 3′ end modification comprises or further comprises a modification to the last and/or second to last nucleotide with 2′-O-Me, 2′-O-moe, 2′-F, or combinations thereof, and optionally one or more PS linkages.

[1303] In some embodiments, the 3′ end modification comprises or further comprises a modification to the last, second to last, and/or third to last nucleotides with 2′-O-Me, 2′-O-moe, 2′-F, or combinations thereof, and optionally one or more PS linkages.

[1304] In some embodiments, the 3′ end modification comprises or further comprises a modification to the last, second to last, third to last, and/or fourth to last nucleotides with 2′-O-Me, 2′-O-moe, 2′-F, or combinations thereof, and optionally one or more PS linkages.

[1305] In some embodiments, the 3′ end modification comprises or further comprises a modification to the last, second to last, third to last, fourth to last, and/or fifth to last nucleotides with 2′-O-Me, 2′-O-moe, 2′-F, or combinations thereof, and optionally one or more PS linkages.

[1306] In some embodiments, an sgRNA or short-sgRNA comprising a 3′ end modification comprises or further comprises a 3′ tail, wherein the 3′ tail comprises a modification of any one or more of the nucleotides present in the 3′ tail. In some embodiments, the 3′ tail is fully modified. In some embodiments, the 3′ tail comprises 1, 2, 3, 4, 5, 6, 7, 8, 9, 10, 1-2, 1-3, 1-4, 1-5, 1-6, 1-7, 1-8, 1-9, or 1-10 nucleotides, optionally where any one or more of these nucleotides are modified.

[1307] In some embodiments, an sgRNA or short-sgRNA is provided comprising a 3′ end modification, wherein the 3′ end modification comprises the 3′ end modification as shown in any one of SEQ ID Nos: 1-132. In some embodiments, an sgRNA is provided comprising a 3′ protective end modification.

[1308] In some embodiments, an sgRNA or short-sgRNA is provided comprising a 3′ end modification, wherein the 3′ end modification comprises (i) a 2′-OMe modified nucleotide at the last nucleotide of the conserved region of an sgRNA or sgRNA (ii) three consecutive 2′O-moe modified nucleotides immediately 5′ to the 2′-OMe modified nucleotide, and (iii) three consecutive PS linkages between the last three nucleotides.

[1309] In some embodiments, an sgRNA or short-sgRNA is provided comprising a 3′ end modification, wherein the 3′ end modification comprises (i) five consecutive 2′-OMe modified nucleotides from the last nucleotide of the conserved region of an sgRNA or sgRNA, and (ii) three PS linkages between the last three nucleotides.

[1310] In some embodiments, an sgRNA or short-sgRNA is provided comprising a 3′ end modification, wherein the 3′ end modification comprises an inverted abasic modified nucleotide at the last nucleotide of the conserved region of an sgRNA or sgRNA.

[1311] In some embodiments, an sgRNA or short-sgRNA is provided comprising a 3′ end modification, wherein the 3′ end modification comprises (i) an inverted abasic modified nucleotide at the last nucleotide of the conserved region of an sgRNA or short-sgRNA, and (ii) three consecutive 2′-OMe modified nucleotides at the last three nucleotides of the conserved region of an sgRNA or short-sgRNA.

[1312] In some embodiments, an sgRNA or short-sgRNA is provided comprising a 3′ end modification, wherein the 3′ end modification comprises (i) 15 consecutive 2′-OMe modified nucleotides from the last nucleotide of the conserved region of an sgRNA, (ii) five consecutive 2′-F modified nucleotides immediately 5′ to the 2′-OMe modified nucleotides, and (iii) three PS linkages between the last three nucleotides.

[1313] In some embodiments, an sgRNA or short-sgRNA is provided comprising a 3′ end modification, wherein the 3′ end modification comprises (i) alternating 2′-OMe modified nucleotides and 2′-F modified nucleotides at the last 20 nucleotides of the conserved region of an sgRNA or sgRNA, and (ii) three PS linkages between the last three nucleotides.

[1314] In some embodiments, an sgRNA or short-sgRNA is provided comprising a 3′ end modification, wherein the 3′ end modification comprises (i) two or three consecutive 2′-OMe modified nucleotides, and (ii) three PS linkages between the last three nucleotides.

[1315] In some embodiments, an sgRNA or short-sgRNA is provided comprising a 3′ end modification, wherein the 3′ end modification comprises one PS linkage between the last and next to last nucleotides.

[1316] In some embodiments, the sgRNA or short-sgRNA comprises a 5′ end modification and a 3′ end modification.

[1317] 3′ Tail

[1318] In some embodiments, the sgRNA comprises a 3′ terminus comprising a 3′ tail, which follows the 3′ end of the conserved portion of an sgRNA. In some embodiments, the 3′ tail comprises between 1 and about 20 nucleotides, between 1 and about 15 nucleotides, between 1 and about 10 nucleotides, between 1 and about 5 nucleotides, between 1 and about 4 nucleotides, between 1 and about 3 nucleotides, and between 1 and about 2 nucleotides. In some embodiments, the 3′ tail comprises about 1, 2, 3, 4, 5, 6, 7, 8, 9, or 10 nucleotides. In some embodiments, the 3′ tail comprises 1, 2, 3, 4, 5, 6, 7, 8, 9, or 10 nucleotides. In some embodiments, the 3′ tail comprises 1 nucleotide. In some embodiments, the 3′ tail comprises 2 nucleotides. In some embodiments, the 3′ tail comprises 3 nucleotides. In some embodiments, the 3′ tail comprises 4 nucleotides. In some embodiments, the 3′ tail comprises about 1-2, 1-3, 1-4, 1-5, 1-7, 1-10, at least 1-5, at least 1-3, at least 1-4, at least 1-5, at least 1-5, at least 1-7, or at least 1-10 nucleotides.

[1319] In some embodiments, the 3′ tail comprising between 1 and 20 nucleotides and follows the 3′ end of the conserved portion of an sgRNA.

[1320] In some embodiments, the 3′ tail comprises or further comprises one or more of a protective end modification, a phosphorothioate (PS) linkage between nucleotides, a 2′-O-Me modified nucleotide, a 2′-O-moe modified nucleotide, a 2′-F modified nucleotide, an inverted abasic modified nucleotide, and a combination thereof.

[1321] In some embodiments, the 3′ tail comprises or further comprises one or more phosphorothioate (PS) linkages between nucleotides. In some embodiments, the 3′ tail comprises or further comprises one or more 2′-O-Me modified nucleotides. In some embodiments, the 3′ tail comprises or further comprises one or more 2′-O-moe modified nucleotides. In some embodiments, the 3′ tail comprises or further comprises one or more 2′-F modified nucleotide. In some embodiments, the 3′ tail comprises or further comprises one or more an inverted abasic modified nucleotides. In some embodiments, the 3′ tail comprises or further comprises one or more protective end modifications. In some embodiments, the 3′ tail comprises or further comprises a combination of one or more of a phosphorothioate (PS) linkage between nucleotides, a 2′-O-Me modified nucleotide, a 2′-O-moe modified nucleotide, a 2′-F modified nucleotide, and an inverted abasic modified nucleotide.

[1322] In some embodiments, the sgRNA does not comprise a 3′ tail.

[1323] 5′ Terminus Region Modifications

[1324] In some embodiments, the 5′ terminus region is modified, for example, the first 1, 2, 3, 4, 5, 6, or 7 nucleotides of the gRNA (e.g., sgRNA, short-sgRNA, or crRNA) are modified. Throughout, this modification may be referred to as a “5′ end modification”. In some embodiments, the first 1, 2, 3, 4, 5, 6, or 7 nucleotides of the 5′ terminus region (i.e., the first 1, 2, 3, 4, 5, 6, or 7 nucleotides from the 5′ end of the 5′ terminus) comprise more than one modification. In some embodiments, at least one of the terminal (i.e., first) 1, 2, 3, 4, 5, 6, or 7 nucleotides from the 5′ end of the 5′ terminus are modified. In some embodiments, at least two of the terminal 1, 2, 3, 4, 5, 6, or 7 nucleotides from the 5′ end of the 5′ terminus are modified. In some embodiments, at least three of the terminal 1, 2, 3, 4, 5, 6, or 7 nucleotides from the 5′ end of the 5′ terminus are modified. In some embodiments, the modification comprises a PS linkage. In some embodiments, the modification to the 5′ terminus region is a 5′ protective end modification. In some embodiments, the 5′ end modification comprises a 5′ protective end modification.

[1325] In some embodiments, both the 5′ and 3′ terminus regions of the sgRNA or short-sgRNA are modified (e.g., including the first and last nucleotides of the gRNA). In some embodiments, only the 5′ terminus region of the sgRNA or short-sgRNA is modified. In some embodiments, only the 3′ terminus region (plus or minus a 3′ tail) of the conserved portion of an sgRNA or short-sgRNA is modified.

[1326] In some embodiments, the gRNA (e.g., sgRNA, short-sgRNA, or crRNA) comprises modifications at 1, 2, 3, 4, 5, 6, or 7 of the first 7 nucleotides from the 5′ end of the 5′ terminus of the gRNA. In some embodiments, the gRNA (e.g., sgRNA, short-sgRNA, or crRNA) comprises modifications at 1, 2, 3, 4, 5, 6, or 7 of the 7 terminal nucleotides from the 3′ end of the 3′ terminus. In some embodiments, 2, 3, or 4 of the first 4 nucleotides from the 5′ end of the 5′ terminus, and/or 2, 3, or 4 of the terminal 4 nucleotides from the 3′ end of the 3′ terminus are modified. In some embodiments, 2, 3, or 4 of the first 4 nucleotides from the 5′ end of the 5′ terminus are linked with phosphorothioate (PS) bonds.

[1327] In some embodiments, the modification to the 5′ terminus and/or 3′ terminus comprises a 2′-O-methyl (2′-O-Me) or 2′-O-(2-methoxyethyl) (2′-O-moe) modification. In some embodiments, the modification comprises a 2′-fluoro (2′-F) modification to a nucleotide. In some embodiments, the modification comprises a phosphorothioate (PS) linkage between nucleotides. In some embodiments, the modification comprises an inverted abasic nucleotide. In some embodiments, the modification comprises a protective end modification. In some embodiments, the modification comprises a more than one modification selected from protective end modification, 2′-O-Me, 2′-O-moe, 2′-fluoro (2′-F), a phosphorothioate (PS) linkage between nucleotides, 2′-H (DNA), an ENA, a UNA, and an inverted abasic nucleotide. In some embodiments, an equivalent modification is encompassed.

[1328] In some embodiments, the gRNA (e.g., sgRNA, short-sgRNA, or crRNA) comprises one or more phosphorothioate (PS) linkages between the first one, two, three, four, five, six, or seven nucleotides at the 5′ terminus. In some embodiments, the sgRNA comprises one or more PS linkages between the last one, two, three, four, five, six, or seven nucleotides at the 3′ terminus. In some embodiments, the sgRNA or short-sgRNA comprises one or more PS linkages between both the last one, two, three, four, five, six, or seven nucleotides at the 3′ terminus and the first 1, 2, 3, 4, 5, 6, or 7 nucleotides from the 5′ end of the 5′ terminus. In some embodiments, in addition to PS linkages, the 5′ and 3′ terminal nucleotides may comprise 2′-O-Me, 2′-O-moe, or 2′-F modified nucleotides.

[1329] In some embodiments, the sgRNA comprises a 5′ end modification, e.g., wherein the first nucleotide of the guide region is modified. In some embodiments, the sgRNA comprises a 5′ end modification, wherein the first nucleotide of the guide region comprises a 5′ protective end modification.

[1330] In some embodiments, the 5′ end modification comprises a modified nucleotide selected from 2′-O-methyl (2′-O-Me) modified nucleotide, 2′-O-(2-methoxyethyl) (2′-O-moe) modified nucleotide, a 2′-fluoro (2′-F) modified nucleotide, a phosphorothioate (PS) linkage between nucleotides, an inverted abasic modified nucleotide, an ENA, a UNA, a 2′H (DNA), or combinations thereof.

[1331] In some embodiments, the 5′ end modification comprises or further comprises a 2′-O-methyl (2′-O-Me) modified nucleotide.

[1332] In some embodiments, the 5′ end modification comprises or further comprises a 2′-fluoro (2′-F) modified nucleotide.

[1333] In some embodiments, the 5′ end modification comprises or further comprises a phosphorothioate (PS) linkage between nucleotides.

[1334] In some embodiments, the 5′ end modification comprises or further comprises an inverted abasic modified nucleotide.

[1335] In some embodiments, the 5′ end modification comprises or further comprises an ENA.

[1336] In some embodiments, the 5′ end modification comprises or further comprises a UNA.

[1337] In some embodiments, the 5′ end modification comprises or further comprises a 2′-H (DNA).

[1338] In some embodiments, the 5′ end modification comprises or further comprises a modification of any one or more of nucleotides 1-7 of the guide region of an gRNA (e.g., sgRNA, short-sgRNA, or crRNA). In some embodiments, the 5′ end modification comprises or further comprises one modified nucleotide. In some embodiments, the 5′ end modification comprises or further comprises two modified nucleotides. In some embodiments, the 5′ end modification comprises or further comprises three modified nucleotides. In some embodiments, the 5′ end modification comprises or further comprises four modified nucleotides. In some embodiments, the 5′ end modification comprises or further comprises five modified nucleotides. In some embodiments, the 5′ end modification comprises or further comprises six modified nucleotides. In some embodiments, the 5′ end modification comprises or further comprises seven modified nucleotides.

[1339] In some embodiments, the 5′ end modification comprises or further comprises a modification of between 1 and 7, between 1 and 5, between 1 and 4, between 1 and 3, or between 1 and 2 nucleotides.

[1340] In some embodiments, the 5′ end modification comprises or further comprises modifications of 1, 2, 3, 4, 5, 6, or 7 nucleotides from the 5′ end. In some embodiments, the 5′ end modification comprises or further comprises modifications of about 1-3, 1-4, 1-5, 1-6, or 1-7 nucleotides from the 5′ end.

[1341] In some embodiments, the 5′ end modification comprises or further comprises modifications at the first nucleotide from the 5′ end of the gRNA (e.g., sgRNA, short-sgRNA, or crRNA). In some embodiments, the 5′ end modification comprises or further comprises modifications at the first and second nucleotide from the 5′ end of the gRNA (e.g., sgRNA, short-sgRNA, or crRNA). In some embodiments, the 5′ end modification comprises or further comprises modifications from the first, second, and third nucleotide at the 5′ end of the gRNA (e.g., sgRNA, short-sgRNA, or crRNA). In some embodiments, the 5′ end modification comprises or further comprises modifications at the first, second, third, and fourth nucleotide from the 5′ end of the gRNA (e.g., sgRNA, short-sgRNA, or crRNA). In some embodiments, the 5′ end modification comprises or further comprises modifications at the first, second, third, fourth, and fifth nucleotide from the 5′ end of the gRNA (e.g., sgRNA, short-sgRNA, or crRNA). In some embodiments, the 5′ end modification comprises or further comprises modifications at the first, second, third, fourth, fifth, and sixth nucleotide from the 5′ end of the gRNA (e.g., sgRNA, short-sgRNA, or crRNA). In some embodiments, the 5′ end modification comprises or further comprises modifications from the first, second, third, fourth, fifth, sixth, and seventh nucleotide at the 5′ end of the gRNA (e.g., sgRNA, short-sgRNA, or crRNA).

[1342] In some embodiments, the 5′ end modification comprises or further comprises a phosphorothioate (PS) linkage between nucleotides, and/or a 2′-O-Me modified nucleotide, and/or a 2′-O-moe modified nucleotide, and/or a 2′-F modified nucleotide, and/or an inverted abasic modified nucleotide, and/or combinations thereof.

[1343] In some embodiments, the 5′ end modification comprises or further comprises 1, 2, 3, 4, 5, 6, and/or 7 PS linkages between nucleotides. In some embodiments, the 5′ end modification comprises or further comprises about 1-2, 1-3, 1-4, 1-5, 1-6, or 1-7 PS linkages between nucleotides.

[1344] In some embodiments, the 5′ end modification comprises or further comprises at least one PS linkage, wherein if there is one PS linkage, the linkage is between nucleotides 1 and 2 of the guide region.

[1345] In some embodiments, the 5′ end modification comprises or further comprises at least two PS linkages, and the linkages are between nucleotides 1 and 2, and 2 and 3 of the guide region.

[1346] In some embodiments, the 5′ end modification comprises or further comprises PS linkages between any one or more of nucleotides 1 and 2, 2 and 3, and 3 and 4 of the guide region.

[1347] In some embodiments, the 5′ end modification comprises or further comprises PS linkages between any one or more of nucleotides 1 and 2, 2 and 3, 3 and 4, and 4 and 5 of the guide region.

[1348] In some embodiments, the 5′ end modification comprises or further comprises PS linkages between any one or more of nucleotides 1 and 2, 2 and 3, 3 and 4, 4 and 5, and 5 and 6 of the guide region.

[1349] In some embodiments, the 5′ end modification comprises or further comprises PS linkages between any one or more of nucleotides 1 and 2, 2 and 3, 3 and 4, 4 and 5, 5 and 6, and 7 and 8 of the guide region.

[1350] In some embodiments, the 5′ end modification comprises or further comprises a modification of one or more of nucleotides 1-7 of the guide region, wherein the modification is a PS linkage, inverted abasic nucleotide, 2′-O-Me, 2′-O-moe, 2′-F, and/or combinations thereof.

[1351] In some embodiments, the 5′ end modification comprises or further comprises a modification to the first nucleotide of the guide region with 2′-O-Me, 2′-O-moe, 2′-F, or combinations thereof, and an optional PS linkage to the next nucleotide;

[1352] In some embodiments, the 5′ end modification comprises or further comprises a modification to the first and/or second nucleotide of the guide region with 2′-O-Me, 2′-O-moe, 2′-F, or combinations thereof, and optionally one or more PS linkages between the first and second nucleotide and/or between the second and third nucleotide.

[1353] In some embodiments, the 5′ end modification comprises or further comprises a modification to the first, second, and/or third nucleotides of the variable region with 2′-O-Me, 2′-O-moe, 2′-F, or combinations thereof, and optionally one or more PS linkages between the first and second nucleotide, between the second and third nucleotide, and/or between the third and the fourth nucleotide.

[1354] In some embodiments, the 5′ end modification comprises or further comprises a modification to the first, second, third, and/or fourth nucleotides of the variable region with 2′-O-Me, 2′-O-moe, 2′-F, or combinations thereof, and optionally one or more PS linkages between the first and second nucleotide, between the second and third nucleotide, between the third and the fourth nucleotide, and/or between the fourth and the fifth nucleotide.

[1355] In some embodiments, the 5′ end modification comprises or further comprises a modification to the first, second, third, fourth, and/or fifth nucleotides of the variable region with 2′-O-Me, 2′-O-moe, 2′-F, or combinations thereof, and optionally one or more PS linkages between the first and second nucleotide, between the second and third nucleotide, between the third and the fourth nucleotide, between the fourth and the fifth nucleotide, and/or between the fifth and the sixth nucleotide.

[1356] In some embodiments, a gRNA (e.g., sgRNA, short-sgRNA, or crRNA) is provided comprising a 5′ end modification, wherein the 5′ end modification comprises a 5′ end modification as shown in any one of SEQ ID Nos: 401-532, 1001, or 1007-1132. In some embodiments, a gRNA (e.g., sgRNA, short-sgRNA, or crRNA) is provided comprising a 5′ end modification, wherein the 5′ end modification comprises a 5′ end modification as shown in nucleotides 1-3 of any one of SEQ ID Nos: 401-532, 1001, or 1007-1132. In some embodiments, a gRNA (e.g., sgRNA, short-sgRNA, or crRNA) is provided comprising a 5′ end modification, wherein the 5′ end modification comprises a 5′ end modification as shown in nucleotides 1-4 of any one of SEQ ID Nos: 401-532, 1001, or 1007-1132. In some embodiments, a gRNA (e.g., sgRNA, short-sgRNA, or crRNA) is provided comprising a 5′ end modification, wherein the 5′ end modification comprises a 5′ end modification as shown in nucleotides 1-5 of any one of SEQ ID Nos: 401-532, 1001, or 1007-1132. In some embodiments, a gRNA (e.g., sgRNA, short-sgRNA, or crRNA) is provided comprising a 5′ end modification, wherein the 5′ end modification comprises a 5′ end modification as shown in nucleotides 1-6 of any one of SEQ ID Nos: 401-532, 1001, or 1007-1132. In some embodiments, a gRNA (e.g., sgRNA, short-sgRNA, or crRNA) is provided comprising a 5′ end modification, wherein the 5′ end modification comprises a 5′ end modification as shown in nucleotides 1-7 of any one of SEQ ID Nos: 401-532, 1001, or 1007-1132.

[1357] In some embodiments, the gRNA (e.g., sgRNA, short-sgRNA, or crRNA) comprises a 5′ end modification comprising a 5′ protective end modification. In some embodiments, a gRNA (e.g., sgRNA, short-sgRNA, or crRNA) is provided comprising a 5′ end modification, wherein the 5′ end modification comprises 2′-OMe modified nucleotides at nucleotides 1, 2, and 3 of the guide region.

[1358] In some embodiments, a gRNA (e.g., sgRNA, short-sgRNA, or crRNA) is provided comprising a 5′ end modification, wherein the 5′ end modification comprises 2′-OMe modified nucleotides at nucleotides 1, 2, and 3 of the guide region and PS linkages between nucleotides 1 and 2, 2 and 3, and 3 and 4 of the guide region.

[1359] In some embodiments, a gRNA (e.g., sgRNA, short-sgRNA, or crRNA) is provided comprising a 5′ end modification, wherein the 5′ end modification comprises 2′-OMe modified nucleotides at nucleotides 1, 2, 3, 4, and 5 of the guide region.

[1360] In some embodiments, a gRNA (e.g., sgRNA, short-sgRNA, or crRNA) is provided comprising a 5′ end modification, wherein the 5′ end modification comprises 2′-OMe modified nucleotides at nucleotides 1, 2, 3, 4, and 5 of the guide region and PS linkages between nucleotides 1 and 2, 2 and 3, 3 and 4, 4 and 5, and 5 and 6 of the guide region.

[1361] In some embodiments, a gRNA (e.g., sgRNA, short-sgRNA, or crRNA) is provided comprising a 5′ end modification, wherein the 5′ end modification comprises 2′O-moe modified nucleotides at nucleotides 1, 2, and 3 of the guide region.

[1362] In some embodiments, a gRNA (e.g., sgRNA, short-sgRNA, or crRNA) is provided comprising a 5′ end modification, wherein the 5′ end modification comprises 2′O-moe modified nucleotides at nucleotides 1, 2, and 3 of the guide region and PS linkages between nucleotides 1 and 2, 2 and 3, and 3 and 4 of the guide region.

[1363] In some embodiments, a gRNA (e.g., sgRNA, short-sgRNA, or crRNA) is provided comprising a 5′ end modification, wherein the 5′ end modification comprises an inverted abasic modified nucleotide at nucleotide 1 of the guide region.

[1364] In some embodiments, agRNA (e.g., sgRNA, short-sgRNA, or crRNA) is provided comprising a 5′ end modification, wherein the 5′ end modification comprises an inverted abasic modified nucleotide at nucleotide 1 of the guide region and 2′-OMe modified nucleotides at nucleotides 1, 2, and 3 of the guide region.

[1365] In some embodiments, agRNA (e.g., sgRNA, short-sgRNA, or crRNA) is provided comprising a 5′ end modification, wherein the 5′ end modification comprises an inverted abasic modified nucleotide at nucleotide 1 of the guide region, 2′-OMe modified nucleotides at nucleotides 1, 2, and 3 of the guide region, and PS linkages between nucleotides 1 and 2, 2 and 3, 3 and 4, 4 and 5, and 5 and 6 of the guide region.

[1366] In some embodiments, an sgRNA or short-sgRNA is provided comprising a 5′ end modification and a 3′ end modification. Any of the 5′ end modifications discussed above and/or otherwise disclosed herein can be combined with a 3′ end modification, such as a 3′ end modification represented in the Table of Sequences and/or discussed below.

[1367] In some embodiments, the sgRNA or short-sgRNA comprises modified nucleotides at the 5′ and 3′ terminus, and modified nucleotides in one or more other regions described in Table 3.

[1368] In some embodiments, the sgRNA or short-sgRNA comprises modified nucleotides that are not at the 5′ or 3′ ends. Exemplary patterns of modifications are described below and in Table 1.

### Modifications to Stabilize Secondary Structures

[1369] In some embodiments, an gRNA (e.g., sgRNA, short-sgRNA, or crRNA) comprises a modification that stabilizes a secondary structure, e.g. a duplex region. Increased stability of a secondary structure can be determined empirically, e.g., by a melting temperature analysis. To simplify the analysis, the secondary structure element sought to be stabilized can be tested in isolation from the rest of the sgRNA structure. Increased stability of a secondary structure can also be determined by a reduction in accessibility of an endonucleolytic cleavage site (e.g., YA site) wherein the modification does not alter the endonucleolytic cleavage site primary structure but does occur in or affect a secondary structure comprising the endonucleolytic cleavage site. This is referred to as having a distal effect on the endonucleolytic cleavage site. In some embodiments, the endonucleolytic cleavage site is in the lower stem. In some embodiments, the endonucleolytic cleavage site is conserved region YA site 1. In some embodiments, the endonucleolytic cleavage site is conserved region YA site 2. In some embodiments, the endonucleolytic cleavage site is conserved region YA site 3. In some embodiments, the endonucleolytic cleavage site is conserved region YA site 10. In some embodiments, the modification is a bicyclic ribose analog modification, such as, a locked nucleic acid (LNA) or LNA-like modification. In some embodiments, the modification is an ENA modification. In some embodiments, nucleotide LS8 comprises a modification that stabilizes a secondary structure. In some embodiments, nucleotide LS11 comprises a modification that stabilizes a secondary structure. In some embodiments, one or both of nucleotides LS8 and LS11 collectively comprise one or more modifications (e.g., 2 modifications), such as ENA modifications, that stabilize a secondary structure. See discussion of G10008 and G10038 in the examples.

### Additional Modifications

[1370] In some embodiments, a gRNA (e.g., sgRNA, short-sgRNA, or crRNA) comprises modifications and/or unmodified nucleotides at at least 15 of nucleotides 1-20 from the 5′ end of the 5′ terminus that match the modification pattern at nucleotides 1-20 of a gRNA described herein, e.g., in Table 1. In some embodiments, a gRNA (e.g., sgRNA, short-sgRNA, or crRNA) comprises modifications and/or unmodified nucleotides at at least 16 of nucleotides 1-20 from the 5′ end of the 5′ terminus that match the modification pattern at nucleotides 1-20 of a gRNA described herein, e.g., in Table 1. In some embodiments, a gRNA (e.g., sgRNA, short-sgRNA, or crRNA) comprises modifications and/or unmodified nucleotides at at least 17 of nucleotides 1-20 from the 5′ end of the 5′ terminus that match the modification pattern at nucleotides 1-20 of a gRNA described herein, e.g., in Table 1. In some embodiments, a gRNA (e.g., sgRNA, short-sgRNA, or crRNA) comprises modifications and/or unmodified nucleotides at at least 18 of nucleotides 1-20 from the 5′ end of the 5′ terminus that match the modification pattern at nucleotides 1-20 of a gRNA described herein, e.g., in Table 1. In some embodiments, a gRNA (e.g., sgRNA, short-sgRNA, or crRNA) comprises modifications and/or unmodified nucleotides at at least 19 of nucleotides 1-20 from the 5′ end of the 5′ terminus that match the modification pattern at nucleotides 1-20 of a gRNA described herein, e.g., in Table 1. In some embodiments, a gRNA (e.g., sgRNA, short-sgRNA, or crRNA) comprises modifications and/or unmodified nucleotides at nucleotides 1-20 from the 5′ end of the 5′ terminus that match the modification pattern at nucleotides 1-20 of a gRNA described herein, e.g., in Table 1. In some embodiments, a gRNA comprises a modification pattern that matches at least 75% of the modification pattern of a gRNA described herein, e.g., in Table 1. In some embodiments, a gRNA comprises a modification pattern that matches at least 80% of the modification pattern of a gRNA described herein, e.g., in Table 1. In some embodiments, a gRNA comprises a modification pattern that matches at least 85% of the modification pattern of a gRNA described herein, e.g., in Table 1. In some embodiments, a gRNA comprises a modification pattern that matches at least 90% of the modification pattern of a gRNA described herein, e.g., in Table 1. In some embodiments, a gRNA comprises a modification pattern that matches at least 95% of the modification pattern of a gRNA described herein, e.g., in Table 1. In some embodiments, a gRNA comprises a modification pattern that matches at least 98% of the modification pattern of a gRNA described herein, e.g., in Table 1. In some embodiments, a gRNA comprises a modification pattern that matches the modification pattern of a gRNA described herein, e.g., in Table 1. In some embodiments, an sgRNA or short-sgRNA comprises modifications in any one or more of the regions shown as modified in Table 1. In some embodiments, an sgRNA or short-sgRNA comprises modifications at any of the positions shown as modified in Table 1. In some embodiments, an sgRNA or short-sgRNA comprises any of the modifications shown in Table 1. Additional modifications are set forth in the summary section above, which may be combined to the extent feasible with modifications disclosed elsewhere herein, such as YA site modifications.

[1371] In some embodiments, an sgRNA or short-sgRNA is provided comprising an upper stem modification, wherein the upper stem modification comprises a modification to any one or more of US1-US12 in the upper stem region.

[1372] In some embodiments, an sgRNA or short-sgRNA is provided comprising an upper stem modification, wherein the upper stem modification comprises a modification of at least 1, 2, 3, 4, 5, 6, 7, 8, 9, 10, 11, or all 12 nucleotides in the upper stem region.

[1373] In some embodiments, an sgRNA or short-sgRNA is provided comprising an upper stem modification, wherein the upper stem modification comprises a modification of about 1-2, 1-3, 1-4, 1-5, 1-6, 1-7, 1-8, 1-9, 1-10, or 1-12 nucleotides in the upper stem region.

[1374] In some embodiments, an sgRNA or short-sgRNA is provided comprising an upper stem modification, wherein the upper stem modification comprises 1, 2, 3, 4, or 5 YA modifications in a YA site. In some embodiments, an sgRNA or short-sgRNA is provided comprising an upper stem modification, wherein the upper stem modification comprises at least 1, 2, 3, 4, or 5 YA modifications. In some embodiments, an sgRNA or short-sgRNA is provided comprising an upper stem modification, wherein the upper stem modification comprises one YA modification. In some embodiments, an sgRNA or short-sgRNA is provided comprising an upper stem modification, wherein the upper stem modification comprises 2 YA modifications. In some embodiments, the upper stem modification comprises 3 YA modifications. In some embodiments, one or more YA modifications are in a YA site. In some embodiments, one or more YA modifications are distal to a YA site.

[1375] In some embodiments, an sgRNA or short-sgRNA is provided comprising an upper stem modification, wherein the upper stem modification comprises a 2′-O-Me modified nucleotide. In some embodiments, an sgRNA or short-sgRNA is provided comprising an upper stem modification, wherein the upper stem modification comprises a 2′-O-moe modified nucleotide. In some embodiments, an sgRNA or short-sgRNA is provided comprising an upper stem modification, wherein the upper stem modification comprises a 2′-F modified nucleotide.

[1376] In some embodiments, an sgRNA or short-sgRNA is provided comprising an upper stem modification, wherein the upper stem modification comprises a 2′-O-Me modified nucleotide, a 2′-O-moe modified nucleotide, a 2′-F modified nucleotide, and/or combinations thereof.

[1377] In some embodiments, the sgRNA or short-sgRNA comprises an upper stem modification as shown in any one of the sequences in Table 1. In some embodiments, such an upper stem modification is combined with a 5′ protective end modification, e.g. as shown for the corresponding sequence in Table 1. In some embodiments, such an upper stem modification is combined with a 3′ protective end modification, e.g. as shown for the corresponding sequence in Table 1. In some embodiments, such an upper stem modification is combined with 5′ and 3′ end modifications as shown for the corresponding sequence in Table 1.

[1378] In some embodiments, the sgRNA or short-sgRNA comprises a 5′ end modification and an upper stem modification. In some embodiments, the sgRNA or short-sgRNA comprises a 3′ end modification and an upper stem modification. In some embodiments, the sgRNA or short-sgRNA comprises a 5′ end modification, a 3′ end modification and an upper stem modification.

[1379] In some embodiments, the sgRNA or short-sgRNA comprises a modification in the hairpin region. In some embodiments, the hairpin region modification is in hairpin 1. In some embodiments, the hairpin region modification is in hairpin 2. In some embodiments, modifications are within hairpin 1 and 2, optionally wherein the “n” between hairpin 1 and 2 is also modified. In some embodiments, the hairpin region modification comprises at least one modified nucleotide selected from a 2′H modified nucleotide (DNA), PS modified nucleotide, a YA modification, a 2′-O-methyl (2′-O-Me) modified nucleotide, a 2′-fluoro (2′-F) modified nucleotide, and/or combinations thereof.

[1380] In some embodiments, an sgRNA or short-sgRNA is provided comprising a hairpin modification, wherein the hairpin modification comprises 1, 2, or 3 YA modifications in a YA site. In some embodiments, an sgRNA or short-sgRNA is provided comprising a hairpin modification, wherein the hairpin modification comprises at least 1, 2, 3, 4, 5, or 6 YA modifications. In some embodiments, an sgRNA or short-sgRNA is provided comprising a hairpin modification, wherein the hairpin modification comprises one YA modification. In some embodiments, an sgRNA or short-sgRNA is provided comprising a hairpin modification, wherein hairpin modification comprises 2 YA modifications. In some embodiments, the hairpin modification comprises 3 YA modifications. In some embodiments, one or more YA modifications are in a YA site. In some embodiments, one or more YA modifications are distal to a YA site.

[1381] In some embodiments, the hairpin modification comprises or further comprises a 2′-O-methyl (2′-O-Me) modified nucleotide.

[1382] In some embodiments, the hairpin modification comprises or further comprises a 2′-fluoro (2′-F) modified nucleotide.

[1383] In some embodiments, the sgRNA or short-sgRNA comprises a 3′ end modification, and a modification in the hairpin region.

[1384] In some embodiments, the sgRNA or short-sgRNA comprises a 5′ end modification, and a modification in the hairpin region.

[1385] In some embodiments, the sgRNA or short-sgRNA comprises an upper stem modification, and a modification in the hairpin region.

[1386] In some embodiments, the sgRNA or short-sgRNA comprises a hairpin modification as shown in any one of the sequences in Table 1. In some embodiments, such a hairpin modification is combined with a 5′ end modification as shown for the corresponding sequence in Table 1. In some embodiments, such a hairpin modification is combined with a 3′ end modification as shown for the corresponding sequence in Table 1. In some embodiments, such an hairpin modification is combined with 5′ and 3′ end modifications as shown for the corresponding sequence in Table 1.

[1387] In some embodiments, the sgRNA or short-sgRNA comprises a 3′ end modification, a modification in the hairpin region, an upper stem modification, and a 5′ end modification.

[1388] In some embodiments, the sgRNA or short-sgRNA comprising one or more modifications of YA sites is a short-sgRNA as described herein, e.g., comprising a hairpin region that lacks at least 5-10 nucleotides, e.g., as defined herein or relative to the hairpin region shown in Table 2. Such an sgRNA may have any of the features set forth herein with respect to an sgRNA, e.g., in the summary and in the detailed description section regarding short-sgRNAs above.

[1389] Exemplary Modified sgRNAs

[1390] In some embodiments, the sgRNAs described herein comprise or consist of any of the sequences shown in Table 1. Further, sgRNAs are encompassed that comprise the modifications of any of the sequences shown in Table 1, and identified therein by SEQ ID No. That is, the nucleotides may be the same or different, but the modification pattern shown may be the same or similar to a modification pattern of a guide sequence of Table 1. A modification pattern includes the relative position and identity of modifications of the sgRNA (e.g. 5′ terminus region, lower stem region, bulge region, upper stem region, nexus region, hairpin 1 region, hairpin 2 region, 3′ tail region).

[1391] In some embodiments, the modification pattern contains at least 50%, 55%, 60%, 70%, 75%, 80%, 85%, 90%, 95%, 96%, 97%, 98%, and 99% of the modifications of any one of the sequences shown in the sequence column of Table 1, or over one or more regions of the sequence. In some embodiments, the modification pattern is at least 50%, 55%, 60%, 70%, 75%, 80%, 85%, 90%, 95%, 96%, 97%, 98%, and 99% identical to the modification pattern of any one of the sequences shown in the sequence column of Table 1. In some embodiments, the modification pattern is at least 50%, 55%, 60%, 70%, 75%, 80%, 85%, 90%, 95%, 96%, 97%, 98%, and 99% identical over 1, 2, 3, 4, 5, 6, 7, or 8 regions of the sequence shown in Table 1, e.g., a 5′ terminus region, lower stem region, bulge region, upper stem region, nexus region, hairpin 1 region, hairpin 2 region, and/or 3′ terminus region.

[1392] For example, in some embodiments, an sgRNA is encompassed wherein the modification pattern is least 50%, 55%, 60%, 70%, 75%, 80%, 85%, 90%, 95%, 96%, 97%, 98%, and 99% identical to the modification pattern of a sequence over the 5′ terminus region. In some embodiments, an sgRNA is encompassed wherein the modification pattern is least 50%, 55%, 60%, 70%, 75%, 80%, 85%, 90%, 95%, 96%, 97%, 98%, and 99% identical over the lower stem. In some embodiments, an sgRNA is encompassed wherein the modification pattern is least 50%, 55%, 60%, 70%, 75%, 80%, 85%, 90%, 95%, 96%, 97%, 98%, and 99% identical over the bulge. In some embodiments, an sgRNA is encompassed wherein the modification pattern is least 50%, 55%, 60%, 70%, 75%, 80%, 85%, 90%, 95%, 96%, 97%, 98%, and 99% identical over the upper stem. In some embodiments, an sgRNA is encompassed wherein the modification pattern is least 50%, 55%, 60%, 70%, 75%, 80%, 85%, 90%, 95%, 96%, 97%, 98%, and 99% identical over the nexus. In some embodiments, an sgRNA is encompassed wherein the modification pattern is least 50%, 55%, 60%, 70%, 75%, 80%, 85%, 90%, 95%, 96%, 97%, 98%, and 99% identical over the hairpin 1. In some embodiments, an sgRNA is encompassed wherein the modification pattern is least 50%, 55%, 60%, 70%, 75%, 80%, 85%, 90%, 95%, 96%, 97%, 98%, and 99% identical over the hairpin 2. In some embodiments, an sgRNA is encompassed wherein the modification pattern is least 50%, 55%, 60%, 70%, 75%, 80%, 85%, 90%, 95%, 96%, 97%, 98%, and 99% identical over the 3′ terminus. In some embodiments, the modification pattern differs from the modification pattern of a sequence of Table 1, or a region (e.g. 5′ terminus, lower stem, bulge, upper stem, nexus, hairpin 1, hairpin 2, 3′ terminus) of such a sequence, at 0, 1, 2, 3, 4, 5, or 6 nucleotides. In some embodiments, the sgRNA comprises modifications that differ from the modifications of a sequence of Table 1, at 0, 1, 2, 3, 4, 5, or 6 nucleotides. In some embodiments, the sgRNA comprises modifications that differ from modifications of a region (e.g. 5′ terminus, lower stem, bulge, upper stem, nexus, hairpin 1, hairpin 2, 3′ terminus) of a sequence of Table 1, at 0, 1, 2, 3, 4, 5, or 6 nucleotides.

[1393] In some embodiments, the sgRNA comprises a 2′-O-methyl (2′-O-Me) modified nucleotide. In some embodiments, the sgRNA comprises a 2′-O-(2-methoxyethyl) (2′-O-moe) modified nucleotide. In some embodiments, the sgRNA comprises a 2′-fluoro (2′-F) modified nucleotide. In some embodiments, the sgRNA comprises a phosphorothioate (PS) bond between nucleotides. In some embodiments, the sgRNA comprises a YA modification.

[1394] In some embodiments, the sgRNA comprises a 5′ end modification, a 3′ end modification, or 5′ and 3′ end modification and further comprises a YA modification. In some embodiments, the 5′ end modification comprises a protective end modification. In some embodiments, the 5′ end modification comprises a phosphorothioate (PS) bond between nucleotides. In some embodiments, the 5′ end modification comprises a 2′-O-methyl (2′-O-Me), 2′-O-(2-methoxyethyl) (2′-O-moe), and/or 2′-fluoro (2′-F) modified nucleotide. In some embodiments, the 5′ end modification comprises at least one phosphorothioate (PS) bond and one or more of a 2′-O-methyl (2′-O-Me), 2′-O-(2-methoxyethyl) (2′-O-moe), and/or 2′-fluoro (2′-F) modified nucleotide. The end modification may comprise a phosphorothioate (PS), 2′-O-methyl (2′-O-Me), 2′-O-(2-methoxyethyl) (2′-O-moe), and/or 2′-fluoro (2′-F) modification. Equivalent end modifications are also encompassed by embodiments described herein. In some embodiments, the sgRNA comprises an end modification in combination with a modification of one or more regions of the sgRNA.

[1395] Modified sgRNAs comprising combinations of 5′ end modifications, 3′ end modifications, upper stem modifications, hairpin modifications, and 3′ terminus modifications, as described above, are encompassed. Exemplary modified sgRNAs are described below.

[1396] In some embodiments, an sgRNA is provided comprising or consisting of any one of the sequences described in SEQ ID Nos: 401-535, 601, 607-732, 801, 807-932, 1001, or 1007-1132.

[1397] In some embodiments, an sgRNA is provided comprising any one of the modified sequences of SEQ ID Nos: 601 or 607-732, wherein the sgRNA further comprises a guide region that is complementary to a target sequence, and directs a Cas9 to its target for cleavage. In some instances, an sgRNA is provided comprising nucleic acids having at least 99, 98, 97, 96, 95, 94, 93, 92, 91, 90, 85, 80, 75, or 70% identity to the nucleic acids of any one of SEQ ID Nos: 401-535, 601, 607-732, 801, 807-932, 1001, or 1007-1132, wherein the modification pattern is identical to the modification pattern shown in the reference sequence identifier in Table 1. In some embodiments, the sgRNA further comprises three phosphorothioate (PS) bonds linking the first four nucleotides at the 5′ terminus and three PS bonds linking the last four nucleotides at the 3′ terminus.

[1398] In some embodiments, the sgRNA comprises modifications at 1, 2, 3, or 4 of the first 4 nucleotides at its 5′ end. In some embodiments, the first three or four nucleotides at the 5′ terminus, and the last three or four nucleotides at the 3′ terminus are modified. In some embodiments, the first four nucleotides at the 5′ end, and the last four nucleotides at the 3′ terminus are linked with phosphorothioate (PS) bonds. In some embodiments, the modification comprises 2′-O-Me. In some embodiments, the modification comprises 2′-F. In some embodiments, the modification comprises 2′-O-moe.

[1399] In some embodiments, the sgRNA comprises, if the nucleotide mentioned is present in the sgRNA, modifications at 1, 2, 3, or 4 of the first 4 nucleotides at the 5′ end. In some embodiments, the sgRNA comprises modifications at 1, 2, 3, or 4 of the last 4 nucleotides at the 3′ end (3′ tail or conserved portion of an sgRNA). In some embodiments, the first four nucleotides at the 5′ terminus and the last four nucleotides at the 3′ terminus are linked with a PS bond, and the first three nucleotides at the 5′ terminus and the last three nucleotides at the 3′ terminus comprise 2′-O-Me or 2′-O-moe modifications.

[1400] In some embodiments, the first four nucleotides at the 5′ terminus and the last four nucleotides at the 3′ terminus are linked with a PS bond, and the first three nucleotides at the 5′ terminus and the last three nucleotides at the 3′ terminus comprise 2′-F modifications.

[1401] In some embodiments, an sgRNA is provided, if the nucleotide mentioned is present in the sgRNA, wherein LS1, LS6, LS7, LS8, LS11, and LS12 are modified with 2′-O-Me. In some embodiments, each of the nucleotides in the bulge region of the sgRNA are modified with 2′-O-Me. In some embodiments, each of the nucleotides in the upper stem region of the sgRNA are modified with 2′-O-Me. In some embodiments, N16, N17, and N18 in the nexus region of the sgRNA are modified with 2′-O-Me. In some embodiments, each of the nucleotides in the hairpin 1 region of the sgRNA are modified with 2′-O-Me. In some embodiments, each of the nucleotides in the hairpin 2 region of the sgRNA are modified with 2′-O-Me.

[1402] In some embodiments, the sgRNA comprises 2′-O-Me modified nucleotides at the following nucleotides: the first three nucleotides at the 5′ terminus; LS1, LS6, LS7, LS8, LS11, and LS12; B1 and B2 in the bulge region; each of the nucleotides in the upper stem region of the sgRNA; N16, N17, and N18 in the nexus region; each of the nucleotides in the hairpin 1 region; each of the nucleotides in the hairpin 2 region; and last four nucleotides at the 3′ terminus.

[1403] In some embodiments, the sgRNA further comprises three phosphorothioate (PS) bonds linking the first four nucleotides at the 5′ terminus and three PS bonds linking the last four nucleotides at the 3′ terminus. In some embodiments, the sgRNA further comprises 2′-O-Me or 2′-F modified nucleic acids at the first three nucleotides at the 5′ terminus, and 2′-O-Me or 2′-F modified nucleic acids at the last four nucleotides at the 3′ terminus. In some embodiments, LS9 and LS10 are modified with 2′-F. In some embodiments, N15, N16, N17, and N18 are modified with 2′-F. In some embodiments, H2-9, H2-10, H2-11, H2-12, H2-13, HS-14, and H2-15 are modified with 2′-F. In some embodiments, the second to last, third to last, and fourth to last nucleotides at the 3′ terminus are modified with 2′-F.

[1404] In some embodiments, sgRNA is provided comprising 2′-F modified nucleic acids at the following nucleotides: LS9 and LS10 in the lower stem region; N15, N16, N17, and N18 in the nexus region; and H2-9, H2-10, H2-11, H2-12, H2-13, HS-14, and H2-15 in the hairpin 2 region. In some embodiments, the sgRNA further comprises 2′-F modified nucleotides at the second to last, third to last, and fourth to last nucleotides at the 3′ terminus. In some embodiments, the sgRNA further comprises three phosphorothioate (PS) bonds linking the first four nucleotides at the 5′ terminus and three PS bonds linking the last four nucleotides at the 3′ terminus. In some embodiments, the sgRNA further comprises 2′-O-Me or 2′-F modified nucleic acids at the first three nucleotides at the 5′ terminus, and 2′-O-Me or 2′-F modified nucleic acids at three of the last four nucleotides at the 3′ terminus.

[1405] In some embodiments, an sgRNA is provided comprising: 2′-O-Me modified nucleotides at the first three nucleotides at the 5′ terminus; 2′-O-Me modified nucleotides at LS1 and LS6; 2′-O-Me modified nucleotides at US1-US12; 2′-O-Me modified nucleotides at H1-1-H1-12; a 2′-O-Me modified nucleotide between Hairpin 1 and Hairpin 2; 2′-O-Me modified nucleotides at H2-1-H2-15; and 2′-O-Me modified nucleotides at the last four nucleotides at the 3′ terminus. In some embodiments, the sgRNA further comprises three phosphorothioate (PS) bonds linking the first four nucleotides at the 5′ terminus and three PS bonds linking the last four nucleotides at the 3′ terminus.

[1406] In some embodiments, an sgRNA is provided comprising 2′-O-Me modified nucleotides at the first three nucleotides at the 5′ terminus; 2′-F modified nucleotides at LS1-LS6; 2′-O-Me modified nucleotides at US1-US12; 2′-O-Me modified nucleotides at H1-1-H1-12; a 2′-O-Me modified nucleotide at “n” between Hairpin 1 and Hairpin 2; 2′-O-Me modified nucleotides at H2-1-H2-15; and 2′-O-Me modified nucleotides at the last four nucleotides at the 3′ terminus. In some embodiments, the sgRNA further comprises three phosphorothioate (PS) bonds linking the first four nucleotides at the 5′ terminus and three PS bonds linking the last four nucleotides at the 3′ terminus.

[1407] In some embodiments, an sgRNA is provided comprising 2′-O-Me modified nucleotides at the first three nucleotides at the 5′ terminus; 2′-F modified nucleotides at LS2-LS5; 2′-O-Me modified nucleotides at LS1 and LS6; 2′-O-Me modified nucleotides at US1-US12; 2′-O-Me modified nucleotides at H1-1-H1-12; a 2′-O-Me modified nucleotide at “n” between Hairpin 1 and Hairpin 2; 2′-O-Me modified nucleotides at H2-1-H2-15; and 2′-O-Me modified nucleotides at the last four nucleotides at the 3′ terminus. In some embodiments, the sgRNA further comprises three phosphorothioate (PS) bonds linking the first four nucleotides at the 5′ terminus and three PS bonds linking the last four nucleotides at the 3′ terminus.

[1408] In some embodiments, an sgRNA is provided comprising 2′-O-Me modified nucleotides at the first three nucleotides at the 5′ terminus; 2′-O-Me modified nucleotides at US1-US12; 2′-O-Me modified nucleotides at LS7, LS8, LS11, and LS12; 2′-O-Me modified nucleotides at H1-1-H1-12; a 2′-O-Me modified nucleotide at “n” between Hairpin 1 and Hairpin 2; 2′-O-Me modified nucleotides at H2-1-H2-15; and 2′-O-Me modified nucleotides at the last four nucleotides at the 3′ terminus. In some embodiments, the sgRNA further comprises three phosphorothioate (PS) bonds linking the first four nucleotides at the 5′ terminus and three PS bonds linking the last four nucleotides at the 3′ terminus.

[1409] In some embodiments, an sgRNA is provided comprising 2′-O-Me modified nucleotides at the first three nucleotides at the 5′ terminus; 2′-O-Me modified nucleotides at US1-US12; 2′-O-Me modified nucleotides at LS8, LS10, and LS12; 2′-O-F modified nucleotides at LS7, LS9, and LS11; 2′-O-Me modified nucleotides at H1-1-H1-12; a 2′-O-Me modified nucleotide between Hairpin 1 and Hairpin 2; 2′-O-Me modified nucleotides at H2-1-H2-15; and 2′-O-Me modified nucleotides at the last four nucleotides at the 3′ terminus. In some embodiments, the sgRNA further comprises three phosphorothioate (PS) bonds linking the first four nucleotides at the 5′ terminus and three PS bonds linking the last four nucleotides at the 3′ terminus.

[1410] In some embodiments, an sgRNA is provided comprising 2′-O-Me modified nucleotides at the first three nucleotides at the 5′ terminus; 2′-O-Me modified nucleotides at LS1, LS6, LS7, LS8, LS11, and LS12; 2′-O-Me modified nucleotides at US1-US12; 2′-O-Me modified nucleotides at H1-1-H1-12; a 2′-O-Me modified nucleotide between Hairpin 1 and Hairpin 2; 2′-O-Me modified nucleotides at H2-1-H2-15; and 2′-O-Me modified nucleotides at the last four nucleotides at the 3′ terminus. In some embodiments, the sgRNA further comprises three phosphorothioate (PS) bonds linking the first four nucleotides at the 5′ terminus and three PS bonds linking the last four nucleotides at the 3′ terminus.

[1411] In some embodiments, an sgRNA is provided comprising 2′-O-Me modified nucleotides at the first three nucleotides at the 5′ terminus; 2′-O-Me modified nucleotides at LS1, LS6, LS7, LS8, LS11, and LS12; 2′-F modified nucleotides at LS9 and LS10; 2′-O-Me modified nucleotides at US1-US12; 2′-O-Me modified nucleotides at H1-1-H1-12; a 2′-O-Me modified nucleotide between Hairpin 1 and Hairpin 2; 2′-O-Me modified nucleotides at H2-1-H2-15; and 2′-O-Me modified nucleotides at the last four nucleotides at the 3′ terminus. In some embodiments, the sgRNA further comprises three phosphorothioate (PS) bonds linking the first four nucleotides at the 5′ terminus and three PS bonds linking the last four nucleotides at the 3′ terminus.

[1412] In some embodiments, an sgRNA is provided comprising 2′-O-Me modified nucleotides at the first three nucleotides at the 5′ terminus; 2′-O-Me modified nucleotides at US1-US12; 2′-O-Me modified nucleotides at H1-1-H1-12; a 2′-O-Me modified nucleotide between Hairpin 1 and Hairpin 2; 2′-O-Me modified nucleotides at H2-1-H2-8; 2′-F modified nucleotides at H2-9-H2-15; 2′-F modified nucleotides at the second from last, third from last, and fourth from last nucleotide at the 3′ terminus; and a 2′-O-Me modified nucleotide at the last nucleotide at the 3′ terminus. In some embodiments, the sgRNA further comprises three phosphorothioate (PS) bonds linking the first four nucleotides at the 5′ terminus and three PS bonds linking the last four nucleotides at the 3′ terminus.

[1413] In some embodiments, an sgRNA is provided comprising 2′-O-Me modified nucleotides at the first three nucleotides at the 5′ terminus; 2′-O-Me modified nucleotides at US1-US12; 2′-O-Me modified nucleotides at H1-2, H1-4, H1-6, H1-8, H1-10, and H1-12; 2′-F modified nucleotides at H1-1, H1-3, H1-5, H1-7, H1-9, and H1-11; a 2′-F modified nucleotide between Hairpin 1 and Hairpin 2; 2′-F modified nucleotides at H2-2, H2-4, H2-6, H2-8, H2-10, H2-12; and H2-14; 2′-O-Me modified nucleotides at H2-1, H2-3, H2-5, H2-7, H2-9, H2-11; H2-13, and H2-15; 2′-F modified nucleotides at the second from last, and fourth from last nucleotide at the 3′ terminus; and 2′-O-Me modified nucleotide at the third from last, and last nucleotide at the 3′ terminus. In some embodiments, the sgRNA further comprises three phosphorothioate (PS) bonds linking the first four nucleotides at the 5′ terminus and three PS bonds linking the last four nucleotides at the 3′ terminus.

[1414] Disclosed herein, in some embodiments, is an sgRNA comprising 2′-O-Me modifications at nucleotides LS8, LS10, LS12, H1-2, H1-4, H1-6, H1-8, H1-10, H1-12, H2-1, H2-3, H2-5, H2-7, H2-9, H2-11, H2-13, and H2-15; and 2′-F modifications at LS7, LS9, LS11; H1-1, H1-3, H1-5, H1-7, H1-9, H1-11, H1-13, H2-2, H2-4, H2-6, H2-8, H2-10, H2-12, and H2-14. In some embodiments, the sgRNA further comprises three phosphorothioate (PS) bonds linking the first four nucleotides at the 5′ terminus and three PS bonds linking the last four nucleotides at the 3′ terminus. In some embodiments, the sgRNA further comprises 2′-O-Me modified nucleotides at the last and third to last nucleotide at the 3′ terminus; and 2′-F modified nucleotides at the second to last and third to last nucleotide at the 3′ terminus.

[1415] In some embodiments, an sgRNA comprising a 5′ end modification and one or more modifications in one or more of: the upper stem region; the hairpin 1 region; and the hairpin 2 region is provided, wherein the 5′ end modification comprises at least two phosphorothioate linkages within the first seven nucleotides of the 5′ terminus.

[1416] In some embodiments, an sgRNA comprising a 5′ end modification and one or more modifications in one or more of: the upper stem region; the hairpin 1 region; and the hairpin 2 region is provided, wherein the 5′ end modification comprises one or more phosphorothioate linkages at the 5′ end. In some embodiments, one or more phosphorothioate bonds link the 5′ terminal nucleotides.

[1417] In some embodiments, an sgRNA is provided, comprising a 5′ end modification and one or more modifications in one or more of: the upper stem region; the hairpin 1 region; and the hairpin 2 region is provided, wherein the 5′ end modification comprises one or more phosphorothioate linkages within the first seven nucleotides of the 5′ terminus.

[1418] In some embodiments, an sgRNA comprising any one of the modified sequences of SEQ ID Nos: 601 or 607-732 is provided, wherein the sgRNA further comprises a 5′ guide region that is at least partially complementary to a target sequence, and optionally directs a Cas9 to its target for cleavage.

[1419] In some embodiments, an sgRNA comprising nucleotides having at least 99, 98, 97, 96, 95, 94, 93, 92, 91, 90, 85, 80, 75, or 70% identity to the nucleotides of any one of SEQ ID Nos: 401-532, 601, 607-732, 801, 807-932, 1001, or 1007-1132, is provided, wherein the modification pattern is identical to the modification pattern shown in the reference sequence identifier. That is, the nucleotides A, U (and/or T in the case of deoxyribonucleotide modifications), C, and G may differ by 99, 98, 97, 96, 95, 94, 93, 92, 91, 90, 85, 80, 75, or 70% compared to what is shown in in the sequences, but the modification remains unchanged.

[1420] In some embodiments, an sgRNA is provided comprising 2′-O-Me modified nucleotides at: the first three nucleotides in the 5′ terminus; LS1, LS6, LS7, LS8, LS11, and LS12 in the lower stem; B1 and B2 in the bulge region; each of the nucleotides in the upper stem region; N16, N17, and N18 in the nexus region; each of the nucleotides in the hairpin 1 region; one nucleotide between hairpin 1 and hairpin 2; each of the nucleotides in the hairpin 2 region; and the last four nucleotides at the 3′ terminus. In some embodiments, the sgRNA further comprises three PS bonds between the first four nucleotides at the 5′ terminus and three PS bonds between the last four nucleotides at the 3′ terminus.

[1421] In some embodiments, an sgRNA is provided comprising 2′-O-Me modified nucleotides at: the first three nucleotides in the 5′ terminus; LS1, LS6, LS7, LS8, LS11, and LS12 in the lower stem; B1-B6 in the bulge region; each of the nucleotides in the upper stem region; N16, N17, and N18 in the nexus region; each of the nucleotides in the hairpin 1 region; one nucleotide between hairpin 1 and hairpin 2; each of the nucleotides in the hairpin 2 region; and the last four nucleotides at the 3′ terminus. In some embodiments, the sgRNA further comprises three PS bonds between the first four nucleotides at the 5′ terminus and three PS bonds between the last four nucleotides in the 3′ terminus region.

[1422] In some embodiments, an sgRNA is provided comprising 2′-F modified nucleotides at: LS9 and LS10 in the lower stem; 15-N18 in the nexus region; H2-9-HS-15 in the hairpin 2 region; and the second to last, third to last, and fourth to last nucleotide in the 3′ terminus region.

[1423] In some embodiments, an sgRNA is provided comprising 2′-F modified nucleotides at: each nucleotide in the lower stem; 15-N18 in the nexus region; H2-9-HS-15 in the hairpin 2 region; and the second to last, third to last, and fourth to last nucleotide in the 3′ terminus region.

[1424] In some embodiments, an sgRNA is provided comprising 2′-O-Me modified nucleotides at LS8, LS10, LS12, H1-2, H1-4, H1-6, H1-8, H1-10, H1-12, H2-1, H2-3, H2-5, H2-7, H2-9, H2-11, H2-13, H2-15, and the last and third to last nucleotides in the 3′ terminus region; and 2′-F modifications at LS7, LS9, LS11; H1-1, H1-3, H1-5, H1-7, H1-9, H1-11, H1-13, H2-2, H2-4, H2-6, H2-8, H2-10, H2-12, H2-14, and the second to last and fourth to last nucleotide in the 3′ terminus region.

[1425] In some embodiments, a single guide RNA (sgRNA) comprises one or more guide region YA site modifications or conserved region YA modifications, a 5′ end modification and one or more modification in one or more of: the upper stem region; the hairpin 1 region; and the hairpin 2 region, wherein the 5′ end modification comprises at least two phosphorothioate linkages within the first seven nucleotides at the 5′ end of the 5′ terminus. In some instances, the modification is a 2′-O-methyl (2′-O-Me) modified nucleotide. In some embodiments, the modification is a 2′-fluoro (2′-F) modified nucleotide.

[1426] In some embodiments, the sgRNA comprises one or more guide region YA site modifications or conserved region YA modifications, modifications at US1 to US12 and/or a modification at H1-1 and/or a modification in H2-1. In some embodiments, the sgRNA comprises one or more guide region YA site modifications or conserved region YA modifications and modifications at H1-1 to H1-12 and/or H2-1 to H2-15. In some embodiments, the sgRNA comprises one or more guide region YA site modifications or conserved region YA modifications and one or more modifications in each of the upper stem region, the hairpin 1 region, and the hairpin 2 region. In some embodiments, the sgRNA comprises one or more guide region YA site modifications or conserved region YA modifications and a modified nucleotide between hairpin 1 and hairpin 2 regions. In some embodiments, the sgRNA comprises one or more guide region YA site modifications or conserved region YA modifications and a modification in the lower stem region.

[1427] In some embodiments, the sgRNA comprises one or more guide region YA site modifications or conserved region YA modifications and a modification in the bulge region. In some embodiments, 50% of the nucleotides in the bulge region are modified, wherein the modification is 2′-O-Me or 2′-F.

[1428] In some embodiments, the sgRNA comprises one or more guide region YA site modifications or conserved region YA modifications and a modification in the nexus region. In some embodiments, the sgRNA comprises modifications at N15, N16, N17, and/or N18 in the nexus region, wherein the modification is 2′-O-Me or 2′-F. In some instances, N16, N17, and N18 are linked with PS bonds.

[1429] In some embodiments, the sgRNA comprises one or more guide region YA site modifications or conserved region YA modifications and modifications at the first four nucleotides at the 5′ end of the 5′ terminus and the last four nucleotides at the 3′ end of the 3′terminus. In some instances, these modifications are linking PS bond (i.e., PS bonds that link the first four and last four nucleotides). In some embodiments, the sgRNA further comprises 2′-O-Me modifications at the first three nucleotides at the 5′ end of the 5′ terminus and the last three nucleotides at the 3′ end of the 3′ terminus.

[1430] In some embodiments, the sgRNA comprises one or more guide region YA site modifications or conserved region YA modifications and modifications LS1, LS6, LS7, LS8, LS11, and LS12, wherein the modification is 2′-O-Me or 2′-F.

[1431] In some embodiments, the sgRNA comprises one or more guide region YA site modifications or conserved region YA modifications and modifications at each of the nucleotides in the bulge region, wherein the modification is 2′-O-Me or 2′-F.

[1432] In some embodiments, the sgRNA comprises one or more guide region YA site modifications or conserved region YA modifications and modifications at each of the nucleotides in the upper stem region, wherein the modification is 2′-O-Me or 2′-F.

[1433] In some embodiments, the sgRNA comprises one or more guide region YA site modifications or conserved region YA modifications and modifications at each of the nucleotides in the hairpin 1 region, wherein the modification is 2′-O-Me or 2′-F.

[1434] In some embodiments, the sgRNA comprises one or more guide region YA site modifications or conserved region YA modifications and modifications at each of the nucleotides in the hairpin 2 region, wherein the modification is 2′-O-Me or 2′-F.

[1435] In some embodiments, an sgRNA is encompassed comprising one or more guide region YA site modifications or conserved region YA modifications and further comprising 2′-O-Me modified nucleotides at the following positions:
[1436] a. LS1, LS6, LS7, LS8, LS11, and/or LS12 in the lower stem region;
[1437] b. B1 and/or B2 in the bulge region;
[1438] c. each nucleotide in the upper stem region;
[1439] d. N16, N17, and/or N18 in the nexus region;
[1440] e. each nucleotide in the hairpin 1 region; and
[1441] f. each nucleotide in the hairpin 2 region.
   In some embodiments, B3-B6 are modified with 2′-O-Me. In some instances, the sgRNA further comprising a 5′ protective end modification, a 3′ protective end modification, or both a 3′ and a 5′ protective end modification. In some embodiments, the sgRNA comprises 2′-F modifications at LS9 and LS10. In some embodiments, the sgRNA comprises 2′F modifications at N15, N16, N17, and N18. In some embodiments, the sgRNA comprises 2′F modifications at H2-9, H2-10, H2-11, H2-12, H2-13, H2-14, and H2-15. In some embodiments, the sgRNA comprises 2′F modifications at the second to last, third to last, and fourth to last nucleotides at the 3′ end of the 3′ terminus.

[1442] In some embodiments, an sgRNA is encompassed comprising one or more guide region YA site modifications or conserved region YA modifications and 2′-F modified nucleotides at the following positions:
[1443] a. LS9 and LS10 in the lower stem region;
[1444] b. N15, N16, N17, and N18 in the nexus region; and
[1445] c. H2-9, H2-10, H2-11, H2-12, H2-13, H2-14, and H2-15 in the hairpin 2 region.
   In some embodiments, the sgRNA comprises 2′-F modified nucleotides at the second to last, third to last, and fourth to last nucleotides at the 3′ terminus. In some embodiments, the sgRNA comprises three phosphorothioate (PS) bonds linking the first four nucleotides at the 5′ end of the 5′ terminus and three PS bonds linking the last four nucleotides at the 3′ end of the 3′ terminus. In some embodiments, the sgRNA comprises 2′-O-Me or 2′-F modified nucleotides at the first three nucleotides at the 5′ end of the 5′ terminus, and 2′-O-Me or 2′-F modified nucleotides at three of the last four nucleotides at the 3′ end of the 3′ terminus.

[1446] In some embodiments, an sgRNA is encompassed comprising one or more guide region YA site modifications or conserved region YA modifications and further comprising:
[1447] a. 2′-O-Me modified nucleotides at the first three nucleotides at the 5′ end of the 5′ terminus;
[1448] b. Optional 2′-O-Me modified nucleotides at LS1 and/or LS6;
[1449] c. 2′-O-Me modified nucleotides at US1-US12;
[1450] d. 2′-O-Me modified nucleotides at H1-1-H1-12;
[1451] e. Optional 2′-O-Me modified nucleotide between Hairpin 1 and Hairpin 2;
[1452] f. 2′-O-Me modified nucleotides at H2-1-H2-15; and
[1453] g. 2′-O-Me modified nucleotides at the last four nucleotides at the 3′ end of the 3′ terminus; and optionally a 5′ protective end modification, a 3′ protective end modification, or both a 3′ and a 5′ protective end modification.

[1454] In some embodiments, an sgRNA is encompassed comprising one or more guide region YA site modifications or conserved region YA modifications and:
[1455] a. 2′-O-Me modified nucleotides at the first three nucleotides at the 5′ end of the 5′ terminus;
[1456] b. 2′-F modified nucleotides at LS1-LS6;
[1457] c. 2′-O-Me modified nucleotides at US1-US12;
[1458] d. 2′-O-Me modified nucleotides at H1-1-H1-12;
[1459] e. a 2′-O-Me modified nucleotide between Hairpin 1 and Hairpin 2;
[1460] f. 2′-O-Me modified nucleotides at H2-1-H2-15; and
[1461] g. 2′-O-Me modified nucleotides at the last four nucleotides at the 3′ end of the 3′ terminus; and optionally a 5′ protective end modification, a 3′ protective end modification, or both a 3′ and a 5′ protective end modification.

[1462] In some embodiments, an sgRNA is encompassed comprising one or more guide region YA site modifications or conserved region YA modifications and further comprising:
[1463] a. 2′-O-Me modified nucleotides at the first three nucleotides at the 5′ terminus;
[1464] b. 2′-F modified nucleotides at LS2-LSS;
[1465] c. 2′-O-Me modified nucleotides at LS1 and LS6;
[1466] d. 2′-O-Me modified nucleotides at US1-US12;
[1467] e. 2′-O-Me modified nucleotides at H1-1-H1-12;
[1468] f. a 2′-O-Me modified nucleotide between Hairpin 1 and Hairpin 2;
[1469] g. 2′-O-Me modified nucleotides at H2-1-H2-15; and
[1470] h. 2′-O-Me modified nucleotides at the last four nucleotides at the 3′ terminus and optionally a 5′ protective end modification, a 3′ protective end modification, or both a 3′ and a 5′ protective end modification.

[1471] In some embodiments, a sgRNA is encompassed comprising one or more guide region YA site modifications or conserved region YA modifications and further comprising:
[1472] a. 2′-O-Me modified nucleotides at the first three nucleotides at the 5′ terminus;
[1473] b. 2′-O-Me modified nucleotides at US1-US12;
[1474] c. 2′-O-Me modified nucleotides at LS7, LS8, LS11, and LS12;
[1475] d. 2′-O-Me modified nucleotides at H1-1-H1-12;
[1476] e. a 2′-O-Me modified nucleotide between Hairpin 1 and Hairpin 2;
[1477] f. 2′-O-Me modified nucleotides at H2-1-H2-15; and
[1478] g. 2′-O-Me modified nucleotides at the last four nucleotides at the 3′ terminus,
   and optionally a 5′ protective end modification, a 3′ protective end modification, or both a 3′ and a 5′ protective end modification.

[1479] In some embodiments, a sgRNA is encompassed comprising one or more guide region YA site modifications or conserved region YA modifications and further comprising:
[1480] a. 2′-O-Me modified nucleotides at the first three nucleotides at the 5′ terminus;
[1481] b. 2′-O-Me modified nucleotides at US1-US12;
[1482] c. 2′-O-Me modified nucleotides at LS7, LS8, LS11, and LS12;
[1483] d. 2′-F modified nucleotides at LS9 and LS10;
[1484] e. 2′-O-Me modified nucleotides at H1-1-H1-12;
[1485] f. a 2′-O-Me modified nucleotide between Hairpin 1 and Hairpin 2;
[1486] g. 2′-O-Me modified nucleotides at H2-1-H2-15; and
[1487] h. 2′-O-Me modified nucleotides at the last four nucleotides at the 3′ terminus,
   and optionally a 5′ protective end modification, a 3′ protective end modification, or both a 3′ and a 5′ protective end modification.

[1488] In some embodiments, an sgRNA is encompassed comprising one or more guide region YA site modifications or conserved region YA modifications and further comprising:
[1489] a. 2′-O-Me modified nucleotides at the first three nucleotides at the 5′ terminus;
[1490] b. 2′-O-Me modified nucleotides at US1-US12;
[1491] c. 2′-O-Me modified nucleotides at LS8, LS10, and LS12;
[1492] d. 2′-O-F modified nucleotides at LS7, LS9, and LS11;
[1493] e. 2′-O-Me modified nucleotides at H1-1-H1-12;
[1494] f. a 2′-O-Me modified nucleotide between Hairpin 1 and Hairpin 2;
[1495] g. 2′-O-Me modified nucleotides at H2-1-H2-15; and
[1496] h. 2′-O-Me modified nucleotides at the last four nucleotides at the 3′ terminus, and optionally a 5′ protective end modification, a 3′ protective end modification, or both a 3′ and a 5′ protective end modification.

[1497] In some embodiments, a sgRNA is encompassed comprising one or more guide region YA site modifications or conserved region YA modifications and further comprising:
[1498] a. 2′-O-Me modified nucleotides at the first three nucleotides at the 5′ terminus;
[1499] b. 2′-O-Me modified nucleotides at LS1, LS6, LS7, LS8, LS11, and LS12
[1500] c. 2′-O-Me modified nucleotides at US1-US12;
[1501] d. 2′-O-Me modified nucleotides at H1-1-H1-12;
[1502] e. a 2′-O-Me modified nucleotide between Hairpin 1 and Hairpin 2;
[1503] f. 2′-O-Me modified nucleotides at H2-1-H2-15; and
[1504] g. 2′-O-Me modified nucleotides at the last four nucleotides at the 3′ terminus, and optionally a 5′ protective end modification, a 3′ protective end modification, or both a 3′ and a 5′ protective end modification.

[1505] In some embodiments, a sgRNA is encompassed comprising one or more guide region YA site modifications or conserved region YA modifications and further comprising:
[1506] a. 2′-O-Me modified nucleotides at the first three nucleotides at the 5′ terminus;
[1507] b. 2′-O-Me modified nucleotides at LS1, LS6, LS7, LS8, LS11, and LS12;
[1508] c. 2′-F modified nucleotides at LS9 and LS10;
[1509] d. 2′-O-Me modified nucleotides at US1-US12;
[1510] e. 2′-O-Me modified nucleotides at H1-1-H1-12;
[1511] f. a 2′-O-Me modified nucleotide between Hairpin 1 and Hairpin 2;
[1512] g. 2′-O-Me modified nucleotides at H2-1-H2-15; and
[1513] h. 2′-O-Me modified nucleotides at the last four nucleotides at the 3′ terminus, and optionally a 5′ protective end modification, a 3′ protective end modification, or both a 3′ and a 5′ protective end modification.

[1514] In some embodiments, a sgRNA is encompassed comprising one or more guide region YA site modifications or conserved region YA modifications and further comprising:
[1515] a. 2′-O-Me modified nucleotides at the first three nucleotides at the 5′ end of the 5′ terminus;
[1516] b. 2′-O-Me modified nucleotides at US1-US12;
[1517] c. 2′-O-Me modified nucleotides at H1-1-H1-12;
[1518] d. a 2′-O-Me modified nucleotide between Hairpin 1 and Hairpin 2;
[1519] e. 2′-O-Me modified nucleotides at H2-1-H2-8;
[1520] f. 2′-F modified nucleotides at H2-9-H2-15;
[1521] g. 2′-F modified nucleotides at the second from last, third from last, and fourth from last nucleotide at the 3′ terminus; and
[1522] h. a 2′-O-Me modified nucleotide at the last nucleotide at the 3′ terminus, and optionally a 5′ protective end modification, a 3′ protective end modification, or both a 3′ and a 5′ protective end modification.

[1523] In some embodiments, a sgRNA is encompassed comprising one or more guide region YA site modifications or conserved region YA modifications and further comprising:
[1524] a. 2′-O-Me modified nucleotides at the first three nucleotides at the 5′ end of the 5′ terminus;
[1525] b. 2′-O-Me modified nucleotides at US1-US12;
[1526] c. 2′-O-Me modified nucleotides at H1-2, H1-4, H1-6, H1-8, H1-10, and H1-12;
[1527] d. 2′-F modified nucleotides at H1-1, H1-3, H1-5, H1-7, H1-9, and H1-11;
[1528] e. a 2′-F modified nucleotide between Hairpin 1 and Hairpin 2;
[1529] f. 2′-F modified nucleotides at H2-2, H2-4, H2-6, H2-8, H2-10, H2-12; and H2-14;
[1530] g. 2′-O-Me modified nucleotides at H2-1, H2-3, H2-5, H2-7, H2-9, H2-11; H2-13, and H2-15;
[1531] h. 2′-F modified nucleotides at the second from last, and fourth from last nucleotide at the 3′ terminus; and
[1532] i. 2′-O-Me modified nucleotide at the third from last and last nucleotide at the 3′ end of the 3′ terminus,
   and optionally a 5′ protective end modification, a 3′ protective end modification, or both a 3′ and a 5′ protective end modification.

[1533] In some embodiments, a sgRNA is encompassed comprising one or more guide region YA site modifications or conserved region YA modifications and further comprising:
[1534] a. 2′-O-Me modified nucleotides LS8, LS10, LS12, H1-2, H1-4, H1-6, H1-8, H1-10, H1-12, H2-1, H2-3, H2-5, H2-7, H2-9, H2-11, H2-13, and H2-15; and
[1535] b. 2′-F modified nucleotides at LS7, LS9, LS11; H1-1, H1-3, H1-5, H1-7, H1-9, H1-11, H1-13, H2-2, H2-4, H2-6, H2-8, H2-10, H2-12, and H2-14, and optionally further comprising three phosphorothioate (PS) bonds linking the first four nucleotides at the 5′ end of the 5′ terminus and three PS bonds linking the last four nucleotides at the 3′ end of the 3′ terminus; and optionally further comprising:
[1536] c. 2′-O-Me modified nucleotides at the last and third to last nucleotide at the 3′ end of the 3′ terminus; and/or
[1537] d. 2′-F modified nucleotides at the second to last, fourth to last, and/or last nucleotide at the 3′ end of the 3′ terminus.

[1538] Any of the foregoing modification patterns can be combined with a modification pattern set forth in the embodiments described above, e.g., in the summary section or Table 1, to the extent that they are non-overlapping. In the event that combining a foregoing modification pattern with a modification pattern set forth in the summary section or Table 1 would result in incompatible modifications (e.g., the same position would be both 2′-OMe and 2′-fluoro), the modification set forth in the summary section or Table 1 controls.

### Short-Single Guide RNA (Short-sgRNA)

[1539] In some embodiments, an sgRNA provided herein is a short-single guide RNAs (short-sgRNAs), e.g., comprising a conserved portion of an sgRNA comprising a hairpin region, wherein the hairpin region lacks at least 5-10 nucleotides or 6-10 nucleotides. In some embodiments, the sgRNA is from S. pyogenes Cas9 (“spyCas9”) or a spyCas9 equivalent. In some embodiments, the sgRNA is not from S. pyogenes Cas9 (“non-spyCas9”). In some embodiments, the 5-10 nucleotides or 6-10 nucleotides are consecutive.

[1540] In some embodiments, a short-sgRNA lacks at least nucleotides 54-58 (AAAAA) of the conserved portion of a spyCas9 sgRNA, as shown in Table 2. In some embodiments, a short-sgRNA is a non-spyCas9 sgRNA that lacks nucleotides corresponding to nucleotides 54-58 (AAAAA) of the conserved portion of a spyCas9 as determined, for example, by pairwise or structural alignment. In some embodiments, the non-spyCas9 sgRNA is Staphylococcus aureus Cas9 (“saCas9”) sgRNA.

[1541] In some embodiments, the hairpin regions lacks 5, 6, 7, 8, 9, 10, 11, or 12 nucleotides. In some embodiments, the hairpin 1 portion lacks 5, 6, 7, 8, 9, 10, 11, or 12 nucleotides. In some embodiments, the hairpin 2 portion lacks 5, 6, 7, 8, 9, 10, 11, or 12 nucleotides. In some embodiments, the hairpin regions lacks 5, 6, 7, 8, 9, 10, 11, or 12 consecutive nucleotides. In some embodiments, the hairpin 1 portion lacks 5, 6, 7, 8, 9, 10, 11, or 12 consecutive nucleotides. In some embodiments, the hairpin 2 portion lacks 5, 6, 7, 8, 9, 10, 11, or 12 consecutive nucleotides. In some embodiments, the 5-10 lacking nucleotides or 6-10 lacking nucleotides are within hairpin 1. In some embodiments, the 5-10 lacking nucleotides or 6-10 lacking nucleotides are within hairpin 2. In some embodiments, the 5-10 lacking nucleotides or 6-10 lacking nucleotides are within hairpin 1 and hairpin 2. In some embodiments, the 5-10 lacking nucleotides or 6-10 lacking nucleotides are within hairpin 1 or hairpin 2. In some embodiments, the 5-10 lacking nucleotides or 6-10 lacking nucleotides are consecutive and include the “N” between hairpin 1 and hairpin 2. In some embodiments, the 5-10 or 6-10 lacking nucleotides include the “N” between hairpin 1 and hairpin 2. In some embodiments, the 5-10 or 6-10 lacking nucleotides are consecutive and span at least a portion of hairpin 1. In some embodiments, the 5-10 or 6-10 lacking nucleotides are consecutive and span at least a portion of hairpin 2. In some embodiments, the 5-10 lacking nucleotides or 6-10 lacking nucleotides are consecutive and span at least a portion of hairpin 1 and a portion of hairpin 2. In some embodiments, the 5-10 lacking nucleotides or 6-10 lacking nucleotides are consecutive and span at least a portion of hairpin 1 and the “N” between hairpin 1 and hairpin 2. In some embodiments, the 5-10 lacking nucleotides comprise or consist of nucleotides 54-58, 54-61, or 53-60 of SEQ ID NO: 400.

[1542] In some embodiments, the short-sgRNA described herein further comprises a nexus region, wherein the nexus region lacks at least one nucleotide. In some embodiments, the short-sgRNA lacks at least 2, 3, 4, 5, 6, 7, 8, 9, or 10 nucleotides in the nexus region. In some embodiments, the short-sgRNA lacks at least 1-2, 1-3, 1-4 nucleotides, 1-5 nucleotides, 1-6 nucleotides, 1-10 nucleotides, or 1-15 nucleotides in the nexus region. In some embodiments, the short-sgRNA lacks each nucleotide in the nexus region.

[1543] In some embodiments, the short-sgRNA further comprises a guide region. In some embodiments, the guide region comprises the first 1-10, 11, 12, 13, 14, 15, 16, 17, 18, 19, or 20 nucleotides at the 5′ end of the short-sgRNA. In some embodiments, the guide region comprises 20 nucleotides. In some embodiments, the guide region comprises 5, 6, 7, 8, 9, 10, 11, 12, 13, 14, 15, 16, 17, 18, 19, 20, 21, 22, 23, 24, or 25 or more nucleotides. In some embodiments, the guide region comprises 17 nucleotides. In some embodiments, the guide region comprises 18 nucleotides. In some embodiments, the guide region comprises 19 nucleotides.

[1544] In some embodiments, the selection of the guide region is determined based on target sequences within the gene of interest for editing. For example, in some embodiments, the short-sgRNA comprises a guide region that is complementary to target sequences of a gene of interest.

[1545] In some embodiments, the target sequence in the gene of interest may be complementary to the guide region of the short-sgRNA. In some embodiments, the degree of complementarity or identity between a guide region of a short-sgRNA and its corresponding target sequence in the gene of interest may be about 50%, 55%, 60%, 65%, 70%, 75%, 80%, 85%, 90%, 95%, 96%, 97%, 98%, 99%, or 100%. In some embodiments, the guide region of a short-sgRNA and the target region of a gene of interest may be 100% complementary or identical. In other embodiments, the guide region of a short-sgRNA and the target region of a gene of interest may contain at least one mismatch. For example, the guide region of a short-sgRNA and the target sequence of a gene of interest may contain 1, 2, 3, 4, 5, 6, 7, 8, 9, or 10 mismatches, where the total length of the target sequence is at least about 17, 18, 19, 20 or more base pairs. In some embodiments, the guide region of a short-sgRNA and the target region of a gene of interest may contain 1-6 mismatches where the guide sequence comprises at least about 17, 18, 19, 20 or more nucleotides. In some embodiments, the guide region of a short-sgRNA and the target region of a gene of interest may contain 1, 2, 3, 4, 5, or 6 mismatches where the guide sequence comprises about 20 nucleotides. The 5′ terminus may comprise nucleotides that are not considered guide regions (i.e., do not function to direct a Cas9 protein to a target nucleic acid).

### Modified Short-Single Guide RNA (Short-sgRNA)

[1546] In some embodiments, the short-sgRNA is modified. The term “modified” or “modification” in the context of a short-sgRNA described herein includes, the modifications described above, including, for example, (a) end modifications, e.g., 5′ end modifications or 3′ end modifications, including 5′ or 3′ protective end modifications, (b) nucleobase (or “base”) modifications, including replacement or removal of bases, (c) sugar modifications, including modifications at the 2′, 3′, and/or 4′ positions, (d) internucleoside linkage modifications, and (e) backbone modifications, which can include modification or replacement of the phosphodiester linkages and/or the ribose sugar. A modification of a nucleotide at a given position includes a modification or replacement of the phosphodiester linkage immediately 3′ of the sugar of the nucleotide. Thus, for example, a nucleic acid comprising a phosphorothioate between the first and second sugars from the 5′ end is considered to comprise a modification at position 1. The term “modified short-sgRNA” generally refers to a short-sgRNA having a modification to the chemical structure of one or more of the base, the sugar, and the phosphodiester linkage or backbone portions, including nucleotide phosphates, all as detailed and exemplified herein.

[1547] Exemplary patterns of modifications are shown in Table 1. Additional exemplary patterns are discussed below.

[1548] Modifications of Guide Regions and/or YA Sites

[1549] In some embodiments, a short-sgRNA comprises modifications at 1, 2, 3, 4, 5, 6, 7, 8, 9, 10, 11, 12, 13, 14, 15, 16, or more YA sites. In some embodiments, the pyrimidine of the YA site comprises a modification (which includes a modification altering the internucleoside linkage immediately 3′ of the sugar of the pyrimidine). In some embodiments, the adenine of the YA site comprises a modification (which includes a modification altering the internucleoside linkage immediately 3′ of the sugar of the adenine). In some embodiments, the pyrimidine and the adenine of the YA site comprise modifications, such as sugar, base, or internucleoside linkage modifications. The YA modifications can be any of the types of modifications set forth herein. In some embodiments, the YA modifications comprise one or more of phosphorothioate, 2′-OMe, or 2′-fluoro. In some embodiments, the YA modifications comprise pyrimidine modifications comprising one or more of phosphorothioate, 2′-OMe, 2′-H, inosine, or 2′-fluoro. In some embodiments, the YA modification comprises a bicyclic ribose analog (e.g., an LNA, BNA, or ENA) within an RNA duplex region that contains one or more YA sites. In some embodiments, the YA modification comprises a bicyclic ribose analog (e.g., an LNA, BNA, or ENA) within an RNA duplex region that contains a YA site, wherein the YA modification is distal to the YA site.

[1550] Guide Region Modifications, including YA Site Modifications

[1551] In some embodiments, the guide region comprises 1, 2, 3, 4, 5, or more YA sites (“guide region YA sites”) that may comprise YA modifications. In some embodiments, one or more YA sites located at 5-end, 6-end, 7-end, 8-end, 9-end, or 10-end from the 5′ end of the 5′ terminus (where “5-end”, etc., refers to position 5 to the 3′ end of the guide region, i.e., the most 3′ nucleotide in the guide region) comprise YA modifications. In some embodiments, two or more YA sites located at 5-end, 6-end, 7-end, 8-end, 9-end, or 10-end from the 5′ end of the 5′ terminus comprise YA modifications. In some embodiments, three or more YA sites located at 5-end, 6-end, 7-end, 8-end, 9-end, or 10-end from the 5′ end of the 5′ terminus comprise YA modifications. In some embodiments, four or more YA sites located at 5-end, 6-end, 7-end, 8-end, 9-end, or 10-end from the 5′ end of the 5′ terminus comprise YA modifications. In some embodiments, five or more YA sites located at 5-end, 6-end, 7-end, 8-end, 9-end, or 10-end from the 5′ end of the 5′ terminus comprise YA modifications. A modified guide region YA site comprises a YA modification.

[1552] In some embodiments, a modified guide region YA site is within 17, 16, 15, 14, 13, 12, 11, 10, or 9 nucleotides of the 3′ terminal nucleotide of the guide region. For example, if a modified guide region YA site is within 10 nucleotides of the 3′ terminal nucleotide of the guide region and the guide region is 20 nucleotides long, then the modified nucleotide of the modified guide region YA site is located at any of positions 11-20. In some embodiments, a YA modification is located within a YA site 20, 19, 18, 17, 16, 15, 14, 13, 12, 11, 10, 9, 8, 7, 6, 5, 4, 3, 2, or 1 nucleotides from the 3′ terminal nucleotide of the guide region. In some embodiments, a YA modification is located 20, 19, 18, 17, 16, 15, 14, 13, 12, 11, 10, 9, 8, 7, 6, 5, 4, 3, 2, or 1 nucleotides from the 3′ terminal nucleotide of the guide region.

[1553] In some embodiments, a modified guide region YA site is at or after nucleotide 4, 5, 6, 7, 8, 9, 10, or 11 from the 5′ end of the 5′ terminus.

[1554] In some embodiments, a modified guide region YA site is other than a 5′ end modification. For example, a short-sgRNA can comprise a 5′ end modification as described herein and further comprise a modified guide region YA site. Alternatively, a short-sgRNA can comprise an unmodified 5′ end and a modified guide region YA site. Alternatively, a short-sgRNA can comprise a modified 5′ end and an unmodified guide region YA site.

[1555] In some embodiments, a modified guide region YA site comprises a modification that at least one nucleotide located 5′ of the guide region YA site does not comprise. For example, if nucleotides 1-3 comprise phosphorothioates, nucleotide 4 comprises only a 2′-OMe modification, and nucleotide 5 is the pyrimidine of a YA site and comprises a phosphorothioate, then the modified guide region YA site comprises a modification (phosphorothioate) that at least one nucleotide located 5′ of the guide region YA site (nucleotide 4) does not comprise. In another example, if nucleotides 1-3 comprise phosphorothioates, and nucleotide 4 is the pyrimidine of a YA site and comprises a 2′-OMe, then the modified guide region YA site comprises a modification (2′-OMe) that at least one nucleotide located 5′ of the guide region YA site (any of nucleotides 1-3) does not comprise. This condition is also always satisfied if an unmodified nucleotide is located 5′ of the modified guide region YA site.

[1556] In some embodiments, the modified guide region YA sites comprise modifications as described for YA sites above.

[1557] Additional embodiments of guide region modifications, including guide region YA site modifications, are set forth elsewhere herein, including in the summary above and in the discussion of gRNAs comprising modifications, including modifications at YA sites above, and elsewhere herein. The guide region of a short-sgRNA may be modified according to any embodiment comprising a modified guide region set forth herein. Any embodiments set forth elsewhere in this disclosure may be combined to the extent feasible with any of the foregoing embodiments.

[1558] Conserved Region YA Site Modifications

[1559] Conserved region YA sites 1-10 are illustrated in FIG. 1B. In some embodiments, 1, 2, 3, 4, 5, 6, 7, 8, 9, or 10 conserved region YA sites comprise modifications.

[1560] In some embodiments, conserved region YA sites 1, 8, or 1 and 8 comprise YA modifications. In some embodiments, conserved region YA sites 1, 2, 3, 4, and 10 comprise YA modifications. In some embodiments, YA sites 2, 3, 4, 8, and 10 comprise YA modifications. In some embodiments, conserved region YA sites 1, 2, 3, and 10 comprise YA modifications. In some embodiments, YA sites 2, 3, 8, and 10 comprise YA modifications. In some embodiments, YA sites 1, 2, 3, 4, 8, and 10 comprise YA modifications. In some embodiments, 1, 2, 3, 4, 5, 6, 7, or 8 additional conserved region YA sites comprise YA modifications.

[1561] In some embodiments, 1, 2, 3, or 4 of conserved region YA sites 2, 3, 4, and 10 comprise YA modifications. In some embodiments, 1, 2, 3, 4, 5, 6, 7, or 8 additional conserved region YA sites comprise YA modifications.

[1562] In some embodiments, the modified conserved region YA sites comprise modifications as described for YA sites above.

[1563] Additional embodiments of conserved region YA site modifications are set forth in the summary above. Any embodiments set forth elsewhere in this disclosure may be combined to the extent feasible with any of the foregoing embodiments.

[1564] Modifications to Terminal Nucleotides

[1565] In some embodiments, the 5′ and/or 3′ terminus regions of a short-sgRNA are modified.

[1566] 3′ Terminus Region Modifications

[1567] In some embodiments, the terminal (i.e., last) 1, 2, 3, 4, 5, 6, or 7 nucleotides in the 3′ terminus region are modified. Throughout, this modification may be referred to as a “3′ end modification”. In some embodiments, the terminal (i.e., last) 1, 2, 3, 4, 5, 6, or 7 nucleotides in the 3′ terminus region comprise more than one modification. In some embodiments, at least one of the terminal (i.e., last) 1, 2, 3, 4, 5, 6, or 7 nucleotides in the 3′ terminus region are modified. In some embodiments, at least two of the terminal (i.e., last) 1, 2, 3, 4, 5, 6, or 7 nucleotides in the 3′ terminus region are modified. In some embodiments, at least three of the terminal (i.e., last) 1, 2, 3, 4, 5, 6, or 7 nucleotides in the 3′ terminus region are modified. In some embodiments, the modification comprises a PS linkage. In some embodiments, the modification to the 3′ terminus region is a 3′ protective end modification. In some embodiments, the 3′ end modification comprises a 3′ protective end modification.

[1568] In some embodiments, the 3′ end modification comprises a modified nucleotide selected from 2′-O-methyl (2′-O-Me) modified nucleotide, 2′-O-(2-methoxyethyl) (2′-O-moe) modified nucleotide, a 2′-fluoro (2′-F) modified nucleotide, a phosphorothioate (PS) linkage between nucleotides, an inverted abasic modified nucleotide, or combinations thereof.

[1569] In some embodiments, the 3′ end modification comprises or further comprises a 2′-O-methyl (2′-O-Me) modified nucleotide.

[1570] In some embodiments, the 3′ end modification comprises or further comprises a 2′-fluoro (2′-F) modified nucleotide.

[1571] In some embodiments, the 3′ end modification comprises or further comprises a phosphorothioate (PS) linkage between nucleotides.

[1572] In some embodiments, the 3′ end modification comprises or further comprises an inverted abasic modified nucleotide.

[1573] In some embodiments, the 3′ end modification comprises or further comprises a modification of any one or more of the last 7, 6, 5, 4, 3, 2, or 1 nucleotides. In some embodiments, the 3′ end modification comprises or further comprises one modified nucleotide. In some embodiments, the 3′ end modification comprises or further comprises two modified nucleotides. In some embodiments, the 3′ end modification comprises or further comprises three modified nucleotides. In some embodiments, the 3′ end modification comprises or further comprises four modified nucleotides. In some embodiments, the 3′ end modification comprises or further comprises five modified nucleotides. In some embodiments, the 3′ end modification comprises or further comprises six modified nucleotides. In some embodiments, the 3′ end modification comprises or further comprises seven modified nucleotides.

[1574] In some embodiments, the 3′ end modification comprises or further comprises a modification of between 1 and 7 or between 1 and 5 nucleotides.

[1575] In some embodiments, the 3′ end modification comprises or further comprises modifications of 1, 2, 3, 4, 5, 6, or 7 nucleotides at the 3′ end of the gRNA.

[1576] In some embodiments, the 3′ end modification comprises or further comprises modifications of about 1-3, 1-5, 1-6, or 1-7 nucleotides at the 3′ end of the gRNA.

[1577] In some embodiments, the 3′ end modification comprises or further comprises any one or more of the following: a phosphorothioate (PS) linkage between nucleotides, a 2′-O-Me modified nucleotide, a 2′-O-moe modified nucleotide, a 2′-F modified nucleotide, an inverted abasic modified nucleotide, and a combination thereof.

[1578] In some embodiments, the 3′ end modification comprises or further comprises 1, 2, 3, 4, 5, 6, or 7 PS linkages between nucleotides.

[1579] In some embodiments, the 3′ end modification comprises or further comprises at least one 2′-O-Me, 2′-O-moe, inverted abasic, or 2′-F modified nucleotide. In some embodiments, the 3′ end modification comprises or further comprises one PS linkage, wherein the linkage is between the last and second to last nucleotide. In some embodiments, the 3′ end modification comprises or further comprises two PS linkages between the last three nucleotides. In some embodiments, the 3′ end modification comprises or further comprises four PS linkages between the last four nucleotides.

[1580] In some embodiments, the 3′ end modification comprises or further comprises PS linkages between any one or more of the last four nucleotides. In some embodiments, the 3′ end modification comprises or further comprises PS linkages between any one or more of the last five nucleotides. In some embodiments, the 3′ end modification comprises or further comprises PS linkages between any one or more of the last 2, 3, 4, 5, 6, or 7 nucleotides.

[1581] In some embodiments, the 3′ end modification comprises or further comprises a modification of one or more of the last 1-7 nucleotides, wherein the modification is a PS linkage, inverted abasic nucleotide, 2′-OMe, 2′-O-moe, 2′-F, or combinations thereof.

[1582] In some embodiments, the 3′ end modification comprises or further comprises a modification to the last nucleotide with 2′-OMe, 2′-O-moe, 2′-F, or combinations thereof, and an optionally one or two PS linkages to the next nucleotide and/or the first nucleotide of the 3′ tail.

[1583] In some embodiments, the 3′ end modification comprises or further comprises a modification to the last and/or second to last nucleotide with 2′-OMe, 2′-O-moe, 2′-F, or combinations thereof, and optionally one or more PS linkages.

[1584] In some embodiments, the 3′ end modification comprises or further comprises a modification to the last, second to last, and/or third to last nucleotides with 2′-OMe, 2′-O-moe, 2′-F, or combinations thereof, and optionally one or more PS linkages.

[1585] In some embodiments, the 3′ end modification comprises or further comprises a modification to the last, second to last, third to last, and/or fourth to last nucleotides with 2′-OMe, 2′-O-moe, 2′-F, or combinations thereof, and optionally one or more PS linkages.

[1586] In some embodiments, the 3′ end modification comprises or further comprises a modification to the last, second to last, third to last, fourth to last, and/or fifth to last nucleotides with 2′-OMe, 2′-O-moe, 2′-F, or combinations thereof, and optionally one or more PS linkages.

[1587] In some embodiments, the gRNA comprising a 3′ end modification comprises or further comprises a 3′ tail, wherein the 3′ tail comprises a modification of any one or more of the nucleotides present in the 3′ tail. In some embodiments, the 3′ tail is fully modified. In some embodiments, the 3′ tail comprises 1, 2, 3, 4, 5, 6, 7, 8, 9, 10, 1-2, 1-3, 1-4, 1-5, 1-6, 1-7, 1-8, 1-9, or 1-10 nucleotides, optionally where any one or more of these nucleotides are modified.

[1588] In some embodiments, a gRNA is provided comprising a 3′ end modification, wherein the 3′ end modification comprises the 3′ end modification as shown in any one of SEQ ID Nos: 1-54. In some embodiments, a gRNA is provided comprising a 3′ protective end modification.

[1589] In some embodiments, agRNA is provided comprising a 3′ end modification, wherein the 3′ end modification comprises (i) a 2′-OMe modified nucleotide at the last nucleotide of the conserved region of an gRNA or short-sgRNA (ii) three consecutive 2′O-moe modified nucleotides immediately 5′ to the 2′-OMe modified nucleotide, and (iii) three consecutive PS linkages between the last three nucleotides.

[1590] In some embodiments, a gRNA is provided comprising a 3′ end modification, wherein the 3′ end modification comprises (i) five consecutive 2′-OMe modified nucleotides from the last nucleotide of the conserved region of an sgRNA or the conserved region of a short-sgRNA, and (ii) three PS linkages between the last three nucleotides.

[1591] In some embodiments, a gRNA is provided comprising a 3′ end modification, wherein the 3′ end modification comprises an inverted abasic modified nucleotide at the last nucleotide of the conserved region of an sgRNA or the conserved region of a short-sgRNA.

[1592] In some embodiments, a gRNA is provided comprising a 3′ end modification, wherein the 3′ end modification comprises (i) an inverted abasic modified nucleotide at the last nucleotide of the conserved region of an sgRNA or short-sgRNA, and (ii) three consecutive 2′-OMe modified nucleotides at the last three nucleotides of the conserved region of an sgRNA or the conserved region of a short-sgRNA.

[1593] In some embodiments, a gRNA is provided comprising (i) 15 consecutive 2′-OMe modified nucleotides from the last nucleotide of the conserved region of an sgRNA or short-sgRNA, (ii) five consecutive 2′-F modified nucleotides immediately 5′ to the 2′-OMe modified nucleotides, and (iii) three PS linkages between the last three nucleotides.

[1594] In some embodiments, a short-sgRNA is provided comprising (i) alternating 2′-OMe modified nucleotides and 2′-F modified nucleotides at the last 20 nucleotides of the conserved region of an sgRNA or short-sgRNA, and (ii) three PS linkages between the last three nucleotides.

[1595] In some embodiments, a short-sgRNA is provided comprising a 3′ end modification, wherein the 3′ end modification comprises (i) two or three consecutive 2′-OMe modified nucleotides, and (ii) three PS linkages between the last three nucleotides.

[1596] In some embodiments, a short-sgRNA is provided comprising a 3′ end modification, wherein the 3′ end modification comprises one PS linkage between the last and next to last nucleotides.

[1597] In some embodiments, a short-sgRNA is provided comprising (i) 15 or 20 consecutive 2′-OMe modified nucleotides, and (ii) three PS linkages between the last three nucleotides.

[1598] In some embodiments, the short-sgRNA comprises a 5′ end modification and a 3′ end modification.

### 3′ Tail

[1599] In some embodiments, the short-sgRNA comprises a 3′ terminus comprising a 3′ tail, which follows and is 3′ of the conserved portion of a short-sgRNA. In some embodiments, the 3′ tail comprises between 1 and about 20 nucleotides, between 1 and about 15 nucleotides, between 1 and about 10 nucleotides, between 1 and about 5 nucleotides, between 1 and about 4 nucleotides, between 1 and about 3 nucleotides, and between 1 and about 2 nucleotides. In some embodiments, the 3′ tail comprises about 1, 2, 3, 4, 5, 6, 7, 8, 9, or 10 nucleotides. In some embodiments, the 3′ tail comprises 1, 2, 3, 4, 5, 6, 7, 8, 9, or 10 nucleotides. In some embodiments, the 3′ tail comprises 1 nucleotide. In some embodiments, the 3′ tail comprises 2 nucleotides. In some embodiments, the 3′ tail comprises 3 nucleotides. In some embodiments, the 3′ tail comprises 4 nucleotides. In some embodiments, the 3′ tail comprises about 1-2, 1-3, 1-4, 1-5, 1-7, 1-10, at least 1-5, at least 1-3, at least 1-4, at least 1-5, at least 1-5, at least 1-7, or at least 1-10 nucleotides.

[1600] In some embodiments, the 3′ tail comprising between 1 and 20 nucleotides and follows the 3′ end of the conserved portion of a short-sgRNA.

[1601] In some embodiments, the 3′ tail comprises or further comprises one or more of a protective end modification, a phosphorothioate (PS) linkage between nucleotides, a 2′-OMe modified nucleotide, a 2′-O-moe modified nucleotide, a 2′-F modified nucleotide, an inverted abasic modified nucleotide, and a combination thereof.

[1602] In some embodiments, the 3′ tail comprises or further comprises one or more phosphorothioate (PS) linkages between nucleotides. In some embodiments, the 3′ tail comprises or further comprises one or more 2′-OMe modified nucleotides. In some embodiments, the 3′ tail comprises or further comprises one or more 2′-O-moe modified nucleotides. In some embodiments, the 3′ tail comprises or further comprises one or more 2′-F modified nucleotide. In some embodiments, the 3′ tail comprises or further comprises one or more an inverted abasic modified nucleotides. In some embodiments, the 3′ tail comprises or further comprises one or more protective end modifications. In some embodiments, the 3′ tail comprises or further comprises a combination of one or more of a phosphorothioate (PS) linkage between nucleotides, a 2′-OMe modified nucleotide, a 2′-O-moe modified nucleotide, a 2′-F modified nucleotide, and an inverted abasic modified nucleotide.

[1603] In some embodiments, the short-sgRNA does not comprise a 3′ tail.

[1604] 5′ Terminus Region Modifications

[1605] In some embodiments, the 5′ terminus region is modified, for example, the first 1, 2, 3, 4, 5, 6, or 7 nucleotides of the short-sgRNA are modified. Throughout, this modification may be referred to as a “5′ end modification”. In some embodiments, the first 1, 2, 3, 4, 5, 6, or 7 nucleotides of the 5′ terminus region comprise more than one modification. In some embodiments, at least one of the terminal (i.e., first) 1, 2, 3, 4, 5, 6, or 7 nucleotides at the 5′ end are modified. In some embodiments, at least two of the terminal 1, 2, 3, 4, 5, 6, or 7 nucleotides at the 5′ terminus region are modified. In some embodiments, at least three of the terminal 1, 2, 3, 4, 5, 6, or 7 nucleotides at the 5′ terminus region are modified. In some embodiments, the 5′ end modification is a 5′ protective end modification.

[1606] In some embodiments, both the 5′ and 3′ terminus regions (e.g., ends) of the short-sgRNA are modified. In some embodiments, only the 5′ terminus region of the short-sgRNA is modified. In some embodiments, only the 3′ terminus region (plus or minus a 3′ tail) of the conserved portion of a short sgRNA is modified.

[1607] In some embodiments, the short-sgRNA comprises modifications at 1, 2, 3, 4, 5, 6, or 7 of the first 7 nucleotides at a 5′ terminus region of the short-sgRNA. In some embodiments, the short-sgRNA comprises modifications at 1, 2, 3, 4, 5, 6, or 7 of the 7 terminal nucleotides at a 3′ terminus region. In some embodiments, 2, 3, or 4 of the first 4 nucleotides at the 5′ terminus region, and/or 2, 3, or 4 of the terminal 4 nucleotides at the 3′ terminus region are modified. In some embodiments, 2, 3, or 4 of the first 4 nucleotides at the 5′ terminus region are linked with phosphorothioate (PS) bonds.

[1608] In some embodiments, the modification to the 5′ terminus and/or 3′ terminus comprises a 2′-O-methyl (2′-O-Me) or 2′-O-(2-methoxyethyl) (2′-O-moe) modification. In some embodiments, the modification comprises a 2′-fluoro (2′-F) modification to a nucleotide. In some embodiments, the modification comprises a phosphorothioate (PS) linkage between nucleotides. In some embodiments, the modification comprises an inverted abasic nucleotide. In some embodiments, the modification comprises a protective end modification. In some embodiments, the modification comprises a more than one modification selected from protective end modification, 2′-O-Me, 2′-O-moe, 2′-fluoro (2′-F), a phosphorothioate (PS) linkage between nucleotides, and an inverted abasic nucleotide. In some embodiments, an equivalent modification is encompassed.

[1609] In some embodiments, the short-sgRNA comprises one or more phosphorothioate (PS) linkages between the first one, two, three, four, five, six, or seven nucleotides at the 5′ terminus. In some embodiments, the short-sgRNA comprises one or more PS linkages between the last one, two, three, four, five, six, or seven nucleotides at the 3′ terminus. In some embodiments, the short-sgRNA comprises one or more PS linkages between both the last one, two, three, four, five, six, or seven nucleotides at the 3′ terminus and the first one, two, three, four, five, six, or seven nucleotides from the 5′ end of the 5′ terminus. In some embodiments, in addition to PS linkages, the 5′ and 3′ terminal nucleotides may comprise 2′-O-Me, 2′-O-moe, or 2′-F modified nucleotides.

[1610] In some embodiments, the short-sgRNA comprises a 5′ end modification, e.g., wherein the first nucleotide of the guide region is modified. In some embodiments, the short-sgRNA comprises a 5′ end modification, wherein the first nucleotide of the guide region comprises a 5′ protective end modification.

[1611] In some embodiments, the 5′ end modification comprises a modified nucleotide selected from 2′-O-methyl (2′-O-Me) modified nucleotide, 2′-O-(2-methoxyethyl) (2′-O-moe) modified nucleotide, a 2′-fluoro (2′-F) modified nucleotide, a phosphorothioate (PS) linkage between nucleotides, an inverted abasic modified nucleotide, or combinations thereof.

[1612] In some embodiments, the 5′ end modification comprises or further comprises a 2′-O-methyl (2′-O-Me) modified nucleotide.

[1613] In some embodiments, the 5′ end modification comprises or further comprises a 2′-fluoro (2′-F) modified nucleotide.

[1614] In some embodiments, the 5′ end modification comprises or further comprises a phosphorothioate (PS) linkage between nucleotides.

[1615] In some embodiments, the 5′ end modification comprises or further comprises an inverted abasic modified nucleotide.

[1616] In some embodiments, the 5′ end modification comprises or further comprises a modification of any one or more of nucleotides 1-7 of the guide region of a short-sgRNA. In some embodiments, the 5′ end modification comprises or further comprises one modified nucleotide. In some embodiments, the 5′ end modification comprises or further comprises two modified nucleotides. In some embodiments, the 5′ end modification comprises or further comprises three modified nucleotides. In some embodiments, the 5′ end modification comprises or further comprises four modified nucleotides. In some embodiments, the 5′ end modification comprises or further comprises five modified nucleotides. In some embodiments, the 5′ end modification comprises or further comprises six modified nucleotides. In some embodiments, the 5′ end modification comprises or further comprises seven modified nucleotides.

[1617] In some embodiments, the 5′ end modification comprises or further comprises a modification of between 1 and 7, between 1 and 5, between 1 and 4, between 1 and 3, or between 1 and 2 nucleotides.

[1618] In some embodiments, the 5′ end modification comprises or further comprises modifications of 1, 2, 3, 4, 5, 6, or 7 nucleotides from the 5′ end. In some embodiments, the 5′ end modification comprises or further comprises modifications of about 1-3, 1-4, 1-5, 1-6, or 1-7 nucleotides from the 5′ end.

[1619] In some embodiments, the 5′ end modification comprises or further comprises modifications at the first nucleotide at the 5′ end of the short-sgRNA. In some embodiments, the 5′ end modification comprises or further comprises modifications at the first and second nucleotide from the 5′ end of the short-sgRNA. In some embodiments, the 5′ end modification comprises or further comprises modifications at the first, second, and third nucleotide from the 5′ end of the short-sgRNA. In some embodiments, the 5′ end modification comprises or further comprises modifications at the first, second, third, and fourth nucleotide from the 5′ end of the short-sgRNA. In some embodiments, the 5′ end modification comprises or further comprises modifications at the first, second, third, fourth, and fifth nucleotide from the 5′ end of the short-sgRNA. In some embodiments, the 5′ end modification comprises or further comprises modifications at the first, second, third, fourth, fifth, and sixth nucleotide from the 5′ end of the short-sgRNA. In some embodiments, the 5′ end modification comprises or further comprises modifications at the first, second, third, fourth, fifth, sixth, and seventh nucleotide from the 5′ end of the short-sgRNA.

[1620] In some embodiments, the 5′ end modification comprises or further comprises a phosphorothioate (PS) linkage between nucleotides, and/or a 2′-O-Me modified nucleotide, and/or a 2′-O-moe modified nucleotide, and/or a 2′-F modified nucleotide, and/or an inverted abasic modified nucleotide, and/or combinations thereof.

[1621] In some embodiments, the 5′ end modification comprises or further comprises 1, 2, 3, 4, 5, 6, and/or 7 PS linkages between nucleotides. In some embodiments, the 5′ end modification comprises or further comprises about 1-2, 1-3, 1-4, 1-5, 1-6, or 1-7 PS linkages between nucleotides.

[1622] In some embodiments, the 5′ end modification comprises or further comprises at least one PS linkage, wherein if there is one PS linkage, the linkage is between nucleotides 1 and 2 of the guide region.

[1623] In some embodiments, the 5′ end modification comprises or further comprises at least two PS linkages, and the linkages are between nucleotides 1 and 2, and 2 and 3 of the guide region.

[1624] In some embodiments, the 5′ end modification comprises or further comprises PS linkages between any one or more of nucleotides 1 and 2, 2 and 3, and 3 and 4 of the guide region.

[1625] In some embodiments, the 5′ end modification comprises or further comprises PS linkages between any one or more of nucleotides 1 and 2, 2 and 3, 3 and 4, and 4 and 5 of the guide region.

[1626] In some embodiments, the 5′ end modification comprises or further comprises PS linkages between any one or more of nucleotides 1 and 2, 2 and 3, 3 and 4, 4 and 5, and 5 and 6 of the guide region.

[1627] In some embodiments, the 5′ end modification comprises or further comprises PS linkages between any one or more of nucleotides 1 and 2, 2 and 3, 3 and 4, 4 and 5, 5 and 6, and 7 and 8 of the guide region.

[1628] In some embodiments, the 5′ end modification comprises or further comprises a modification of one or more of nucleotides 1-7 of the guide region, wherein the modification is a PS linkage, inverted abasic nucleotide, 2′-O-Me, 2′-O-moe, 2′-F, and/or combinations thereof.

[1629] In some embodiments, the 5′ end modification comprises or further comprises a modification to the first nucleotide of the guide region with 2′-O-Me, 2′-O-moe, 2′-F, or combinations thereof, and an optional PS linkage to the next nucleotide;

[1630] In some embodiments, the 5′ end modification comprises or further comprises a modification to the first and/or second nucleotide of the guide region with 2′-O-Me, 2′-O-moe, 2′-F, or combinations thereof, and optionally one or more PS linkages between the first and second nucleotide and/or between the second and third nucleotide.

[1631] In some embodiments, the 5′ end modification comprises or further comprises a modification to the first, second, and/or third nucleotides of the variable region with 2′-O-Me, 2′-O-moe, 2′-F, or combinations thereof, and optionally one or more PS linkages between the first and second nucleotide, between the second and third nucleotide, and/or between the third and the fourth nucleotide.

[1632] In some embodiments, the 5′ end modification comprises or further comprises a modification to the first, second, third, and/or fourth nucleotides of the variable region with 2′-O-Me, 2′-O-moe, 2′-F, or combinations thereof, and optionally one or more PS linkages between the first and second nucleotide, between the second and third nucleotide, between the third and the fourth nucleotide, and/or between the fourth and the fifth nucleotide.

[1633] In some embodiments, the 5′ end modification comprises or further comprises a modification to the first, second, third, fourth, and/or fifth nucleotides of the variable region with 2′-O-Me, 2′-O-moe, 2′-F, or combinations thereof, and optionally one or more PS linkages between the first and second nucleotide, between the second and third nucleotide, between the third and the fourth nucleotide, between the fourth and the fifth nucleotide, and/or between the fifth and the sixth nucleotide.

[1634] In some embodiments, a short-sgRNA is provided comprising a 5′ end modification, wherein the 5′ end modification comprises a 5′ end modification as shown in any one of SEQ ID Nos: 1-54.

[1635] In some embodiments, the sgRNA comprises a 5′ end modification comprising a 5′ protective end modification. In some embodiments, a short-sgRNA is provided comprising a 5′ end modification, wherein the 5′ end modification comprises 2′-OMe modified nucleotides at nucleotides 1, 2, and 3 of the guide region.

[1636] In some embodiments, a short-sgRNA is provided comprising a 5′ end modification, wherein the 5′ end modification comprises 2′-OMe modified nucleotides at nucleotides 1, 2, and 3 of the guide region and PS linkages between nucleotides 1 and 2, 2 and 3, and 3 and 4 of the guide region.

[1637] In some embodiments, a short-sgRNA is provided comprising a 5′ end modification, wherein the 5′ end modification comprises 2′-OMe modified nucleotides at nucleotides 1, 2, 3, 4, and 5 of the guide region.

[1638] In some embodiments, a short-sgRNA is provided comprising a 5′ end modification, wherein the 5′ end modification comprises 2′-OMe modified nucleotides at nucleotides 1, 2, 3, 4, and 5 of the guide region and PS linkages between nucleotides 1 and 2, 2 and 3, 3 and 4, 4 and 5, and 5 and 6 of the guide region.

[1639] In some embodiments, a short-sgRNA is provided comprising a 5′ end modification, wherein the 5′ end modification comprises 2′O-moe modified nucleotides at nucleotides 1, 2, and 3 of the guide region.

[1640] In some embodiments, a short-sgRNA is provided comprising a 5′ end modification, wherein the 5′ end modification comprises 2′O-moe modified nucleotides at nucleotides 1, 2, and 3 of the guide region and PS linkages between nucleotides 1 and 2, 2 and 3, and 3 and 4 of the guide region.

[1641] In some embodiments, a short-sgRNA is provided comprising a 5′ end modification, wherein the 5′ end modification comprises an inverted abasic modified nucleotide at nucleotide 1 of the guide region.

[1642] In some embodiments, a short-sgRNA is provided comprising a 5′ end modification, wherein the 5′ end modification comprises an inverted abasic modified nucleotide at nucleotide 1 of the guide region and 2′-OMe modified nucleotides at nucleotides 1, 2, and 3 of the guide region.

[1643] In some embodiments, a short-sgRNA is provided comprising a 5′ end modification, wherein the 5′ end modification comprises an inverted abasic modified nucleotide at nucleotide 1 of the guide region, 2′-OMe modified nucleotides at nucleotides 1, 2, and 3 of the guide region, and PS linkages between nucleotides 1 and 2, 2 and 3, 3 and 4, 4 and 5, and 5 and 6 of the guide region.

[1644] In some embodiments, a short-sgRNA is provided comprising a 5′ end modification and a 3′ end modification. In some embodiments, the sgRNA comprises modified nucleotides at the 5′ and 3′ terminus, and modified nucleotides in one or more other regions described in Table 3.

[1645] In some embodiments, the sgRNA comprises modified nucleotides that are not at the 5′ or 3′ ends. Exemplary patterns of modifications are described below and in Table 1.

[1646] Upper Stem Modifications

[1647] In some embodiments, a short-sgRNA is provided comprising an upper stem modification, wherein the upper stem modification comprises a modification to any one or more of US1-US12 in the upper stem region.

[1648] In some embodiments, a short-sgRNA is provided comprising an upper stem modification, wherein the upper stem modification comprises a modification of at least 1, 2, 3, 4, 5, 6, 7, 8, 9, 10, 11, or all 12 nucleotides in the upper stem region.

[1649] In some embodiments, a short-sgRNA is provided comprising an upper stem modification, wherein the upper stem modification comprises a modification of about 1-2, 1-3, 1-4, 1-5, 1-6, 1-7, 1-8, 1-9, 1-10, or 1-12 nucleotides in the upper stem region.

[1650] In some embodiments, an sgRNA is provided comprising an upper stem modification, wherein the upper stem modification comprises 1, 2, 3, 4, or 5 YA modifications in a YA site. In some embodiments, an sgRNA is provided comprising an upper stem modification, wherein the upper stem modification comprises at least 1, 2, 3, 4, or 5 YA modifications. In some embodiments, an sgRNA is provided comprising an upper stem modification, wherein the upper stem modification comprises one YA modification. In some embodiments, an sgRNA is provided comprising an upper stem modification, wherein the upper stem modification comprises 2 YA modifications. In some embodiments, the upper stem modification comprises 3 YA modifications. In some embodiments, one or more YA modifications are in a YA site. In some embodiments, one or more YA modifications are distal to a YA site.

[1651] In some embodiments, a short-sgRNA is provided comprising an upper stem modification, wherein the upper stem modification comprises a 2′-OMe modified nucleotide. In some embodiments, a short-sgRNA is provided comprising an upper stem modification, wherein the upper stem modification comprises a 2′-O-moe modified nucleotide. In some embodiments, a short-sgRNA is provided comprising an upper stem modification, wherein the upper stem modification comprises a 2′-F modified nucleotide.

[1652] In some embodiments, a short-sgRNA is provided comprising an upper stem modification, wherein the upper stem modification comprises a 2′-OMe modified nucleotide, a 2′-O-moe modified nucleotide, a 2′-F modified nucleotide, and/or combinations thereof.

[1653] In some embodiments, the sgRNA comprises an upper stem modification as shown in any one of the sequences in Table 1. In some embodiments, such an upper stem modification is combined with a 5′ protective end modification, e.g. as shown for the corresponding sequence in Table 1. In some embodiments, such an upper stem modification is combined with a 3′ protective end modification, e.g. as shown for the corresponding sequence in Table 1. In some embodiments, such an upper stem modification is combined with 5′ and 3′ end modifications as shown for the corresponding sequence in Table 1.

[1654] In some embodiments, the short-sgRNA comprises a 5′ end modification and an upper stem modification. In some embodiments, the short-sgRNA comprises a 3′ end modification and an upper stem modification. In some embodiments, the short-sgRNA comprises a 5′ end modification, a 3′ end modification and an upper stem modification.

[1655] Hairpin Modifications

[1656] In some embodiments, the short-sgRNA comprises a modification in the hairpin region. In some embodiments, the hairpin region modification comprises at least one modified nucleotide selected from a 2′-O-methyl (2′-OMe) modified nucleotide, a 2′-fluoro (2′-F) modified nucleotide, and/or combinations thereof.

[1657] In some embodiments, the hairpin region modification is in the hairpin 1 region. In some embodiments, the hairpin region modification is in the hairpin 2 region. In some embodiments, modifications are within the hairpin 1 and hairpin 2 regions, optionally wherein the “n” between hairpin 1 and 2 is also modified.

[1658] In some embodiments, a short-sgRNA is provided comprising a hairpin modification, wherein the hairpin modification comprises 1, 2, or 3 YA modifications in a YA site. In some embodiments, a short-sgRNA is provided comprising a hairpin modification, wherein the hairpin modification comprises at least 1, 2, 3, 4, 5, or 6 YA modifications. In some embodiments, a short-sgRNA is provided comprising a hairpin modification, wherein the hairpin modification comprises one YA modification. In some embodiments, a short-sgRNA is provided comprising a hairpin modification, wherein hairpin modification comprises 2 YA modifications. In some embodiments, the hairpin modification comprises 3 YA modifications. In some embodiments, one or more YA modifications are in a YA site. In some embodiments, one or more YA modifications are distal to a YA site.

[1659] In some embodiments, the hairpin modification comprises or further comprises a 2′-O-methyl (2′-OMe) modified nucleotide.

[1660] In some embodiments, the hairpin modification comprises or further comprises a 2′-fluoro (2′-F) modified nucleotide.

[1661] In some embodiments, the hairpin region modification comprises at least one modified nucleotide selected from a 2′H modified nucleotide (DNA), PS modified nucleotide, a YA modification, a 2′-O-methyl (2′-O-Me) modified nucleotide, a 2′-fluoro (2′-F) modified nucleotide, and/or combinations thereof.

[1662] In some embodiments, the short-sgRNA comprises a 3′ end modification, and a modification in the hairpin region.

[1663] In some embodiments, the short-sgRNA comprises a 5′ end modification, and a modification in the hairpin region.

[1664] In some embodiments, the short-sgRNA comprises an upper stem modification, and a modification in the hairpin region.

[1665] In some embodiments, the short-sgRNA comprises a hairpin modification as shown in any one of the sequences in Table 1. In some embodiments, such a hairpin modification is combined with a 5′ end modification as shown for the corresponding sequence in Table 1. In some embodiments, such a hairpin modification is combined with a 3′ end modification as shown for the corresponding sequence in Table 1. In some embodiments, such a hairpin modification is combined with 5′ and 3′ end modifications as shown for the corresponding sequence in Table 1.

[1666] In some embodiments, the short-sgRNA comprises a 3′ end modification, a modification in the hairpin region, an upper stem modification, and a 5′ end modification.

[1667] Exemplary Modified Short-sgRNAs

[1668] In some embodiments, the short-sgRNAs described herein comprise or consist of any of the sequences shown in Table 1. Further, short-sgRNAs are encompassed that comprise the modifications of any of the sequences shown in Table 1, and identified therein by SEQ ID No. That is, the nucleotides may be the same or different, but the modification pattern shown may be the same or similar to a modification pattern of a guide sequence of Table 1. A modification pattern includes the relative position and identity of modifications of the short-sgRNA (e.g. 5′ terminus region, lower stem region, bulge region, upper stem region, nexus region, hairpin 1 region, hairpin 2 region, 3′ tail region).

[1669] In some embodiments, the modification pattern contains at least 50%, 55%, 60%, 70%, 75%, 80%, 85%, 90%, 95%, 96%, 97%, 98%, and 99% of the modifications of any one of the sequences shown in the sequence column of Table 1, or over one or more regions of the sequence. In some embodiments, the modification pattern is at least 50%, 55%, 60%, 70%, 75%, 80%, 85%, 90%, 95%, 96%, 97%, 98%, and 99% identical to the modification pattern of any one of the sequences shown in the sequence column of Table 1. In some embodiments, the modification pattern is at least 50%, 55%, 60%, 70%, 75%, 80%, 85%, 90%, 95%, 96%, 97%, 98%, and 99% identical over one or more (e.g., 1, 2, 3, 4, 5, 6, 7, or 8) regions of the sequence shown in Table 1, e.g., a 5′ terminus region, lower stem region, bulge region, upper stem region, nexus region, hairpin 1 region, hairpin 2 region, and/or 3′ terminus region.

[1670] For example, in some embodiments, a short-sgRNA is encompassed wherein the modification pattern is least 50%, 55%, 60%, 70%, 75%, 80%, 85%, 90%, 95%, 96%, 97%, 98%, and 99% identical to the modification pattern of a sequence over the 5′ terminus region. In some embodiments, a short-sgRNA is encompassed wherein the modification pattern is least 50%, 55%, 60%, 70%, 75%, 80%, 85%, 90%, 95%, 96%, 97%, 98%, and 99% identical over the lower stem. In some embodiments, a short-sgRNA is encompassed wherein the modification pattern is least 50%, 55%, 60%, 70%, 75%, 80%, 85%, 90%, 95%, 96%, 97%, 98%, and 99% identical over the bulge. In some embodiments, a short-sgRNA is encompassed wherein the modification pattern is least 50%, 55%, 60%, 70%, 75%, 80%, 85%, 90%, 95%, 96%, 97%, 98%, and 99% identical over the upper stem. In some embodiments, a short-sgRNA is encompassed wherein the modification pattern is least 50%, 55%, 60%, 70%, 75%, 80%, 85%, 90%, 95%, 96%, 97%, 98%, and 99% identical over the nexus. In some embodiments, a short-sgRNA is encompassed wherein the modification pattern is least 50%, 55%, 60%, 70%, 75%, 80%, 85%, 90%, 95%, 96%, 97%, 98%, and 99% identical over the hairpin 1. In some embodiments, a short-sgRNA is encompassed wherein the modification pattern is least 50%, 55%, 60%, 70%, 75%, 80%, 85%, 90%, 95%, 96%, 97%, 98%, and 99% identical over the hairpin 2. In some embodiments, a short-sgRNA is encompassed wherein the modification pattern is least 50%, 55%, 60%, 70%, 75%, 80%, 85%, 90%, 95%, 96%, 97%, 98%, and 99% identical over the 3′ terminus. In some embodiments, the modification pattern differs from the modification pattern of a sequence of Table 1, or a region (e.g. 5′ terminus, lower stem, bulge, upper stem, nexus, hairpin 1, hairpin 2, 3′ terminus) of such a sequence, at 0, 1, 2, 3, 4, 5, or 6 nucleotides. In some embodiments, the short-sgRNA comprises modifications that differ from the modifications of a sequence of Table 1, at 0, 1, 2, 3, 4, 5, or 6 nucleotides. In some embodiments, the short-sgRNA comprises modifications that differ from modifications of a region (e.g. 5′ terminus, lower stem, bulge, upper stem, nexus, hairpin 1, hairpin 2, 3′ terminus) of a sequence of Table 1, at 0, 1, 2, 3, 4, 5, or 6 nucleotides.

[1671] In some embodiments, the short-sgRNA comprises a 2′-O-methyl (2′-O-Me) modified nucleotide. In some embodiments, the short-sgRNA comprises a 2′-O-(2-methoxyethyl) (2′-O-moe) modified nucleotide. In some embodiments, the short-sgRNA comprises a 2′-fluoro (2′-F) modified nucleotide. In some embodiments, the short-sgRNA comprises a phosphorothioate (PS) bond between nucleotides. In some embodiments, the sgRNA comprises a YA modification.

[1672] In some embodiments, the short-sgRNA comprises a 5′ end modification, a 3′ end modification, or 5′ and 3′ end modification, such as a protective end modification. In some embodiments, the 5′ end modification comprises a phosphorothioate (PS) bond between nucleotides. In some embodiments, the 5′ end modification comprises a 2′-O-methyl (2′-O-Me), 2′-O-(2-methoxyethyl) (2′-O-moe), and/or 2′-fluoro (2′-F) modified nucleotide. In some embodiments, the 5′ end modification comprises at least one phosphorothioate (PS) bond and one or more of a 2′-O-methyl (2′-O-Me), 2′-O-(2-methoxyethyl) (2′-O-moe), and/or 2′-fluoro (2′-F) modified nucleotide. The end modification may comprise a phosphorothioate (PS), 2′-O-methyl (2′-O-Me), 2′-O-(2-methoxyethyl) (2′-O-moe), and/or 2′-fluoro (2′-F) modification. Equivalent end modifications are also encompassed by embodiments described herein. In some embodiments, the short-sgRNA comprises an end modification in combination with a modification of one or more regions of the short-sgRNA.

[1673] Modified short-sgRNAs comprising combinations of 5′ end modifications, 3′ end modifications, upper stem modifications, hairpin modifications, and 3′ terminus modifications, as described above, are encompassed. Exemplary modified short-sgRNAs are described below.

[1674] In some embodiments, the invention comprises a short-sgRNA comprising or consisting of any one of the sequences described in SEQ ID Nos: 1-54, 201-254, and 301-354.

[1675] In some embodiments, a short-sgRNA is provided comprising any one of the modified sequences of SEQ ID Nos: 201-254, and 301-354, wherein the short-sgRNA further comprises a guide region that is complementary to a target sequence, and directs a Cas9 to its target for cleavage. In some instances, the invention comprises short-sgRNA comprising nucleic acids having at least 99, 98, 97, 96, 95, 94, 93, 92, 91, 90, 85, 80, 75, or 70% identity to the nucleic acids of any one of SEQ ID Nos: 1-54, 201-254, and 301-354, wherein the modification pattern is identical to the modification pattern shown in the reference sequence identifier in Table 1. In some embodiments, the short-sgRNA further comprises three phosphorothioate (PS) bonds linking the first four nucleotides at the 5′ terminus and three PS bonds linking the last four nucleotides at the 3′ terminus.

[1676] In some embodiments, the short-sgRNA comprises modifications at 1, 2, 3, or 4 of the first 4 nucleotides at its 5′ end. In some embodiments, the first three or four nucleotides at the 5′ terminus, and the last three or four nucleotides at the 3′ terminus are modified. In some embodiments, the first four nucleotides at the 5′ end, and the last four nucleotides at the 3′ terminus are linked with phosphorothioate (PS) bonds. In some embodiments, the modification comprises 2′-O-Me. In some embodiments, the modification comprises 2′-F. In some embodiments, the modification comprises 2′-O-moe.

[1677] In some embodiments, the short-sgRNA comprises, if the nucleotide mentioned is present in the short-sgRNA, modifications at 1, 2, 3, or 4 of the first 4 nucleotides at the 5′ end. In some embodiments, the short-sgRNA comprises modifications at 1, 2, 3, or 4 of the last 4 nucleotides at the 3′ end (3′ tail or conserved portion of an sgRNA). In some embodiments, the first four nucleotides at the 5′ terminus and the last four nucleotides at the 3′ terminus are linked with a PS bond, and the first three nucleotides at the 5′ terminus and the last three nucleotides at the 3′ terminus comprise 2′-O-Me or 2′-O-moe modifications.

[1678] In some embodiments, the first four nucleotides at the 5′ terminus and the last four nucleotides at the 3′ terminus are linked with a PS bond, and the first three nucleotides at the 5′ terminus and the last three nucleotides at the 3′ terminus comprise 2′-F modifications.

[1679] In some embodiments, a short-sgRNA is provided, if the nucleotide mentioned is present in the short-sgRNA, wherein LS1, LS6, LS7, LS8, LS11, and LS12 are modified with 2′-O-Me. In some embodiments, each of the nucleotides in the bulge region of the short-sgRNA are modified with 2′-O-Me. In some embodiments, each of the nucleotides in the upper stem region of the short-sgRNA are modified with 2′-O-Me. In some embodiments, N16, N17, and N18 in the nexus region of the short-sgRNA are modified with 2′-O-Me. In some embodiments, each of the nucleotides remaining in the hairpin 1 region of the short-sgRNA are modified with 2′-O-Me. In some embodiments, each of the nucleotides remaining in the hairpin 2 region of the short-sgRNA are modified with 2′-O-Me.

[1680] In some embodiments, a short-sgRNA comprising a 5′ end modification and one or more modifications in one or more of: the upper stem region; the hairpin 1 region; and the hairpin 2 region is provided, wherein the 5′ end modification comprises at least two phosphorothioate linkages within the first seven nucleotides of the 5′ terminus.

[1681] In some embodiments, a short-sgRNA comprising a 5′ end modification and one or more modifications in one or more of: the upper stem region; the hairpin 1 region; and the hairpin 2 region is provided, wherein the 5′ end modification comprises one or more phosphorothioate linkages at the 5′ end. In some embodiments, one or more phorphorothioate bonds link the 5′ terminal nucleotides.

[1682] In some embodiments, a short-sgRNA comprising a 5′ end modification and one or more modifications in one or more of: the upper stem region; the hairpin 1 region; and the hairpin 2 region is provided, wherein the 5′ end modification comprises one or more phosphorothioate linkages within the first seven nucleotides of the 5′ terminus.

[1683] In some embodiments, the invention comprises a short-sgRNA comprising any one of the modified sequences of SEQ ID Nos: 201-254, and 301-354, wherein the short-sgRNA further comprises a 5′ guide region that is at least partially complementary to a target sequence, and optionally directs a Cas9 to its target for cleavage.

[1684] In some embodiments, the invention comprises a short-sgRNA comprising nucleotides having at least 99, 98, 97, 96, 95, 94, 93, 92, 91, 90, 85, 80, 75, or 70% identity to the nucleotides of any one of SEQ ID Nos: 1-54, 201-254, and 301-354, wherein the modification pattern is identical to the modification pattern shown in the reference sequence identifier. That is, the nucleotides A, U, C, and G may differ by 99, 98, 97, 96, 95, 94, 93, 92, 91, 90, 85, 80, 75, or 70% compared to what is shown in in the sequences, but the modification remains unchanged.

[1685] In some embodiments, a short-sgRNA is provided comprising, if the nucleotide mentioned is present in the short guide, 2′-O-Me modified nucleotides at: the first three nucleotides in the 5′ terminus; LS1, LS6, LS7, LS8, LS11, and LS12 in the lower stem; B1 and B2 in the bulge region; each of the nucleotides in the upper stem region; N16, N17, and N18 in the nexus region; each of the nucleotides in the hairpin 1 region; one nucleotide between hairpin 1 and hairpin 2; each of the nucleotides in the hairpin 2 region; and the last four nucleotides at the 3′ terminus. In some embodiments, the sgRNA further comprises three PS bonds between the first four nucleotides at the 5′ terminus and three PS bonds between the last four nucleotides at the 3′ terminus.

[1686] In some embodiments, a short-sgRNA is provided comprising, if the nucleotide mentioned is present in the short guide, 2′-O-Me modified nucleotides at: the first three nucleotides in the 5′ terminus; LS1, LS6, LS7, LS8, LS11, and LS12 in the lower stem; B1-B6 in the bulge region; each of the nucleotides in the upper stem region; N16, N17, and N18 in the nexus region; each of the nucleotides in the hairpin 1 region; one nucleotide between hairpin 1 and hairpin 2; each of the nucleotides in the hairpin 2 region; and the last four nucleotides at the 3′ terminus. In some embodiments, the sgRNA further comprises three PS bonds between the first four nucleotides at the 5′ terminus and three PS bonds between the last four nucleotides at the 3′ terminus.

[1687] In some embodiments, a short-sgRNA is provided comprising 2′-F modified nucleotides at: LS9 and LS10 in the lower stem; 15-N18 in the nexus region; H2-9-HS-15 in the hairpin 2 region; and the second to last, third to last, and fourth to last nucleotide in the 3′ terminus region.

[1688] In some embodiments, a short-sgRNA is provided comprising 2′-F modified nucleotides at: each nucleotide in the lower stem; 15-N18 in the nexus region; H2-9-HS-15 in the hairpin 2 region; and the second to last, third to last, and fourth to last nucleotide in the 3′ terminus region.

[1689] In some embodiments, a short-sgRNA is provided comprising, if the nucleotide mentioned is present in the short guide, 2′-OMe modified nucleotides at LS8, LS10, LS12, H1-2, H1-4, H1-6, H1-8, H1-10, H1-12, H2-1, H2-3, H2-5, H2-7, H2-9, H2-11, H2-13, H2-15, and the last and third to last nucleotides at the 3′ terminus; and 2′-F modifications at LS7, LS9, LS11; H1-1, H1-3, H1-5, H1-7, H1-9, H1-11, H1-13, H2-2, H2-4, H2-6, H2-8, H2-10, H2-12, H2-14, and the second to last and fourth to last nucleotide at the 3′ terminus.

[1690] Any of the foregoing modification patterns can be combined with a modification pattern set forth in the embodiments described above, e.g., in the summary section or Table 1, to the extent that they are non-overlapping. In the event that combining a foregoing modification pattern with a modification pattern set forth in the summary section or Table 1 would result in incompatible modifications (e.g., the same position would be both 2′-OMe and 2′-fluoro), the modification set forth in the summary section or Table 1 controls.

### Compositions and Kits

[1691] Compositions comprising any of the gRNAs (e.g., sgRNAs, short-sgRNAs, dgRNAs, or crRNAs) described herein and a carrier, excipient, diluent, or the like are encompassed. In some instances, the excipient or diluent is inert. In some instances, the excipient or diluent is not inert. In some embodiments, a pharmaceutical formulation is provided comprising any of the gRNAs (e.g., sgRNAs, short-sgRNAs, dgRNAs, or crRNAs) described herein and a pharmaceutically acceptable carrier, excipient, diluent, or the like. In some embodiments, the pharmaceutical formulation further comprises an LNP. In some embodiments, the pharmaceutical formulation further comprises a Cas9 protein or an mRNA encoding a Cas9 protein. In some embodiments, the pharmaceutical formulation comprises any one or more of the gRNAs (e.g., sgRNAs, short-sgRNAs, dgRNAs, or crRNAs), an LNP, and a Cas9 protein or mRNA encoding a Cas9 protein.

[1692] Also provided are kits comprising one or more gRNAs (e.g., sgRNAs, short-sgRNAs, dgRNAs, or crRNAs), compositions, or pharmaceutical formulations described herein. In some embodiments, a kit further comprises one or more of a solvent, solution, buffer, each separate from the composition or pharmaceutical formulation, instructions, or desiccant.

Compositions comprising an RNA-Guided DNA Binding Agent or mRNA Encoding RNA-Guided DNA Binding Agent

[1693] In some embodiments, compositions or pharmaceutical formulations are provided comprising at least one gRNA (e.g., sgRNA, short-sgRNA, dgRNA, or crRNA) described herein and a nuclease or a nucleic acid (e.g., an mRNA) encoding a nuclease. In some embodiments, the nuclease is an RNA-guided DNA binding agent, such as a Cas protein. In some embodiments, the short-sgRNA together with a Cas protein or nucleic acid (e.g., mRNA) encoding Cas protein is called a Cas RNP. In some embodiments, the RNA-guided DNA binding agent is one that functions with the short-sgRNA to direct a RNA-guided DNA binding agent to a target nucleic acid sequence. In some embodiments, the RNA-guided DNA binding agent is a Cas protein from the Type-II CRISPR/Cas system. In some embodiments, the Cas protein is Cas9. In some embodiments, the Cas9 protein is a wild type Cas9. In some embodiments, the Cas9 protein is derived from the Streptococcus pyogenes Cas9 protein, e.g., a S. pyogenes Cas9 (sypCas9). In some embodiments, compositions are provided comprising at least one short-sgRNA and a nuclease or an mRNA encoding a spyCas9. In some embodiments, the Cas9 protein is not derived from S. pyogenes, but functions in the same way as S. pyogenes Cas9 such that short-sgRNA that is specific to S. pyogenes Cas9 will direct the non-S. pyogenes Cas9 to its target site. In some embodiments, the Cas9 protein is derived from the Staphylococcus aureus Cas9 protein, e.g., a SaCas9. In some embodiments, compositions are provided comprising at least one short-sgRNA and a nuclease or an mRNA encoding a saCas9. In some embodiments, the Cas induces a double strand break in target DNA. Equivalents of spyCas9 and saCas9 protein are encompassed by the embodiments described herein.

[1694] RNA-guided DNA binding agents, including Cas9, encompass modified and variants thereof. Modified versions having one catalytic domain, either RuvC or HNH, that is inactive are termed “nickases.” Nickases cut only one strand on the target DNA, thus creating a single-strand break. A single-strand break may also be known as a “nick.” In some embodiments, the compositions and methods comprise nickases. In some embodiments, the compositions and methods comprise a nickase RNA-guided DNA binding agent, such as a nickase Cas9, that induces a nick rather than a double strand break in the target DNA.

[1695] In some embodiments, the RNA-guided DNA binding agent may be modified to contain only one functional nuclease domain. For example, the RNA-guided DNA binding agent may be modified such that one of the nuclease domains is mutated or fully or partially deleted to reduce its nucleic acid cleavage activity. In some embodiments, a nickase Cas is used having a RuvC domain with reduced activity. In some embodiments, a nickase Cas is used having an inactive RuvC domain. In some embodiments, a nickase Cas is used having an HNH domain with reduced activity. In some embodiments, a nickase Cas is used having an inactive HNH domain.

[1696] In some embodiments, a conserved amino acid within an RNA-guided DNA binding agent nuclease domain is substituted to reduce or alter nuclease activity. In some embodiments, a Cas protein may comprise an amino acid substitution in the RuvC or RuvC-like nuclease domain. Exemplary amino acid substitutions in the RuvC or RuvC-like nuclease domain include D10A (based on the S. pyogenes Cas9 protein). In some embodiments, the Cas protein may comprise an amino acid substitution in the HNH or HNH-like nuclease domain. Exemplary amino acid substitutions in the HNH or HNH-like nuclease domain include E762A, H840A, N863A, H983A, and D986A (based on the spyCas9 protein).

[1697] In some embodiments, the RNP complex described herein comprises a nickase or an mRNA encoding a nickase and a pair of gRNAs (one or both of which may be sgRNAs and/or short-sgRNAs) that are complementary to the sense and antisense strands of the target sequence, respectively. In this embodiment, the gRNAs (e.g., sgRNAs and/or short-sgRNAs) direct the nickase to a target sequence and introduce a double stranded break (DSB) by generating a nick on opposite strands of the target sequence (i.e., double nicking). In some embodiments, use of double nicking may improve specificity and reduce off-target effects. In some embodiments, a nickase RNA-guided DNA binding agent is used together with two separate short-sgRNAs targeting opposite strands of DNA to produce a double nick in the target DNA. In some embodiments, a nickase RNA-guided DNA binding agent is used together with two separate gRNAs (e.g., sgRNAs or short-sgRNAs) that are selected to be in close proximity to produce a double nick in the target DNA.

[1698] In some embodiments, chimeric Cas proteins are used, where one domain or region of the protein is replaced by a portion of a different protein. In some embodiments, a Cas nuclease domain may be replaced with a domain from a different nuclease such as Fok1. In some embodiments, a Cas protein may be a modified nuclease.

[1699] In some embodiments, the Cas protein comprises a fusion protein comprising a catalytically inactive Cas (e.g., Cas9) linked to a heterologous functional domain (see, e.g., WO2014152432). In some embodiments, the catalytically inactive Cas9 is from S. pyogenes. In some embodiments, the catalytically inactive Cas comprises mutations that inactivate the Cas. In some embodiments, the heterologous functional domain is a domain that modifies gene expression, histones, or DNA. In some embodiments, the heterologous functional domain is a transcriptional activation domain or a transcriptional repressor domain.

[1700] In some embodiments, the target sequence may be adjacent to a PAM. In some embodiments, the PAM may be adjacent to or within 1, 2, 3, or 4, nucleotides of the 3′ end of the target sequence. The length and the sequence of the PAM may depend on the Cas protein used. For example, the PAM may be selected from a consensus or a particular PAM sequence for a specific Cas9 protein or Cas9 ortholog, including those disclosed in FIG. 1 of Ran et al., Nature 520:186-191 (2015). In some embodiments, the PAM may comprise 2, 3, 4, 5, 6, 7, 8, 9, or 10 nucleotides in length. Non-limiting exemplary PAM sequences include NGG, NAG, NGA, NGAG, NGCG, NNGRRT, TTN, NGGNG, NG, NAAAAN, NNAAAAW, NNNNACA, GNNNCNNA, and NNNNGATT (wherein N is defined as any nucleotide, and W is defined as either A or T, and R is defined as either A or G). In some embodiments, the PAM sequence may be NGG. In some embodiments, the PAM sequence may be NGGNG. In some embodiments, the PAM sequence may be NNAAAAW.

[1701] In some embodiments, an nucleic acid (e.g., mRNA) comprising an ORF encoding an RNA-guided DNA binding agent is used which has one or more of the following features. In some embodiments, the ORF encoding the RNA-guided DNA-binding agent, e.g. a Cas9 nuclease such as an S. pyogenes Cas9, has an adenine content ranging from its minimum adenine content to about 150% of its minimum adenine content. In some embodiments, the adenine content of the ORF is less than or equal to about 145%, 140%, 135%, 130%, 125%, 120%, 115%, 110%, 105%, 104%, 103%, 102%, or 101% of its minimum adenine content. In some embodiments, the ORF has an adenine content equal to its minimum adenine content. In some embodiments, the ORF has an adenine content less than or equal to about 150% of its minimum adenine content. In some embodiments, the ORF has an adenine content less than or equal to about 145% of its minimum adenine content. In some embodiments, the ORF has an adenine content less than or equal to about 140% of its minimum adenine content. In some embodiments, the ORF has an adenine content less than or equal to about 135% of its minimum adenine content. In some embodiments, the ORF has an adenine content less than or equal to about 130% of its minimum adenine content. In some embodiments, the ORF has an adenine content less than or equal to about 125% of its minimum adenine content. In some embodiments, the ORF has an adenine content less than or equal to about 120% of its minimum adenine content. In some embodiments, the ORF has an adenine content less than or equal to about 115% of its minimum adenine content. In some embodiments, the ORF has an adenine content less than or equal to about 110% of its minimum adenine content. In some embodiments, the ORF has an adenine content less than or equal to about 105% of its minimum adenine content. In some embodiments, the ORF has an adenine content less than or equal to about 104% of its minimum adenine content. In some embodiments, the ORF has an adenine content less than or equal to about 103% of its minimum adenine content. In some embodiments, the ORF has an adenine content less than or equal to about 102% of its minimum adenine content. In some embodiments, the ORF has an adenine content less than or equal to about 101% of its minimum adenine content.

[1702] In some embodiments, the ORF has an adenine dinucleotide content ranging from its minimum adenine dinucleotide content to 200% of its minimum adenine dinucleotide content. In some embodiments, the adenine dinucleotide content of the ORF is less than or equal to about 195%, 190%, 185%, 180%, 175%, 170%, 165%, 160%, 155%, 150%, 145%, 140%, 135%, 130%, 125%, 120%, 115%, 110%, 105%, 104%, 103%, 102%, or 101% of its minimum adenine dinucleotide content. In some embodiments, the ORF has an adenine dinucleotide content equal to its minimum adenine dinucleotide content. In some embodiments, the ORF has an adenine dinucleotide content less than or equal to about 200% of its minimum adenine dinucleotide content. In some embodiments, the ORF has an adenine dinucleotide content less than or equal to about 195% of its minimum adenine dinucleotide content. In some embodiments, the ORF has an adenine dinucleotide content less than or equal to about 190% of its minimum adenine dinucleotide content. In some embodiments, the ORF has an adenine dinucleotide content less than or equal to about 185% of its minimum adenine dinucleotide content. In some embodiments, the ORF has an adenine dinucleotide content less than or equal to about 180% of its minimum adenine dinucleotide content. In some embodiments, the ORF has an adenine dinucleotide content less than or equal to about 175% of its minimum adenine dinucleotide content. In some embodiments, the ORF has an adenine dinucleotide content less than or equal to about 170% of its minimum adenine dinucleotide content. In some embodiments, the ORF has an adenine dinucleotide content less than or equal to about 165% of its minimum adenine dinucleotide content. In some embodiments, the ORF has an adenine dinucleotide content less than or equal to about 160% of its minimum adenine dinucleotide content. In some embodiments, the ORF has an adenine dinucleotide content less than or equal to about 155% of its minimum adenine dinucleotide content. In some embodiments, the ORF has an adenine dinucleotide content equal to its minimum adenine dinucleotide content. In some embodiments, the ORF has an adenine dinucleotide content less than or equal to about 150% of its minimum adenine dinucleotide content. In some embodiments, the ORF has an adenine dinucleotide content less than or equal to about 145% of its minimum adenine dinucleotide content. In some embodiments, the ORF has an adenine dinucleotide content less than or equal to about 140% of its minimum adenine dinucleotide content. In some embodiments, the ORF has an adenine dinucleotide content less than or equal to about 135% of its minimum adenine dinucleotide content. In some embodiments, the ORF has an adenine dinucleotide content less than or equal to about 130% of its minimum adenine dinucleotide content. In some embodiments, the ORF has an adenine dinucleotide content less than or equal to about 125% of its minimum adenine dinucleotide content. In some embodiments, the ORF has an adenine dinucleotide content less than or equal to about 120% of its minimum adenine dinucleotide content. In some embodiments, the ORF has an adenine dinucleotide content less than or equal to about 115% of its minimum adenine dinucleotide content. In some embodiments, the ORF has an adenine dinucleotide content less than or equal to about 110% of its minimum adenine dinucleotide content. In some embodiments, the ORF has an adenine dinucleotide content less than or equal to about 105% of its minimum adenine dinucleotide content. In some embodiments, the ORF has an adenine dinucleotide content less than or equal to about 104% of its minimum adenine dinucleotide content. In some embodiments, the ORF has an adenine dinucleotide content less than or equal to about 103% of its minimum adenine dinucleotide content. In some embodiments, the ORF has an adenine dinucleotide content less than or equal to about 102% of its minimum adenine dinucleotide content. In some embodiments, the ORF has an adenine dinucleotide content less than or equal to about 101% of its minimum adenine dinucleotide content.

[1703] In some embodiments, the ORF has an adenine dinucleotide content ranging from its minimum adenine dinucleotide content to the adenine dinucleotide content that is 90% or lower of the maximum adenine dinucleotide content of a reference sequence that encodes the same protein as the mRNA in question. In some embodiments, the adenine dinucleotide content of the ORF is less than or equal to about 85%, 80%, 75%, 70%, 65%, 60%, 55%, 50%, 45%, 40%, 35%, 30%, 25%, 20%, 15%, 10%, or 5% of the maximum adenine dinucleotide content of a reference sequence that encodes the same protein as the mRNA in question.

[1704] In some embodiments, the ORF has an adenine trinucleotide content ranging from 0 adenine trinucleotides to 1, 2, 3, 4, 5, 6, 7, 8, 9, 10, 20, 30, 40, or 50 adenine trinucleotides (where a longer run of adenines counts as the number of unique three-adenine segments within it, e.g., an adenine tetranucleotide contains two adenine trinucleotides, an adenine pentanucleotide contains three adenine trinucleotides, etc.). In some embodiments, the ORF has an adenine trinucleotide content ranging from 0% adenine trinucleotides to 0.1%, 0.2%, 0.3%, 0.4%, 0.5%, 0.6%, 0.7%, 0.8%, 0.9%, 1%, 1.5%, or 2% adenine trinucleotides, where the percentage content of adenine trinucleotides is calculated as the percentage of positions in a sequence that are occupied by adenines that form part of an adenine trinucleotide (or longer run of adenines), such that the sequences UUUAAA and UUUUAAAA would each have an adenine trinucleotide content of 50%. For example, in some embodiments, the ORF has an adenine trinucleotide content less than or equal to 2%. For example, in some embodiments, the ORF has an adenine trinucleotide content less than or equal to 1.5%. In some embodiments, the ORF has an adenine trinucleotide content less than or equal to 1%. In some embodiments, the ORF has an adenine trinucleotide content less than or equal to 0.9%. In some embodiments, the ORF has an adenine trinucleotide content less than or equal to 0.8%. In some embodiments, the ORF has an adenine trinucleotide content less than or equal to 0.7%. In some embodiments, the ORF has an adenine trinucleotide content less than or equal to 0.6%. In some embodiments, the ORF has an adenine trinucleotide content less than or equal to 0.5%. In some embodiments, the ORF has an adenine trinucleotide content less than or equal to 0.4%. In some embodiments, the ORF has an adenine trinucleotide content less than or equal to 0.3%. In some embodiments, the ORF has an adenine trinucleotide content less than or equal to 0.2%. In some embodiments, the ORF has an adenine trinucleotide content less than or equal to 0.1%. In some embodiments, a nucleic acid is provided that encodes an RNA-guided DNA-binding agent comprising an ORF containing no adenine trinucleotides.

[1705] In some embodiments, the ORF has an adenine trinucleotide content ranging from its minimum adenine trinucleotide content to the adenine trinucleotide content that is 90% or lower of the maximum adenine trinucleotide content of a reference sequence that encodes the same protein as the mRNA in question. In some embodiments, the adenine trinucleotide content of the ORF is less than or equal to about 85%, 80%, 75%, 70%, 65%, 60%, 55%, 50%, 45%, 40%, 35%, 30%, 25%, 20%, 15%, 10%, or 5% of the maximum adenine trinucleotide content of a reference sequence that encodes the same protein as the mRNA in question.

[1706] A given ORF can be reduced in adenine content or adenine dinucleotide content or adenine trinucleotide content, for example, by using minimal adenine codons in a sufficient fraction of the ORF. For example, an amino acid sequence for an RNA-guided DNA-binding agent can be back-translated into an ORF sequence by converting amino acids to codons, wherein some or all of the ORF uses the exemplary minimal adenine codons shown below. In some embodiments, at least about 50%, 55%, 60%, 65%, 70%, 75%, 80%, 85%, 90%, 95%, 98%, 99%, or 100% of the codons in the ORF are codons listed in Table 4.

TABLE 4
Exemplary minimal adenine codons

| | Amino Acid | Minimal adenine codon |
|---|---|---|
| A | Alanine | GCU or GCC or GCG |
| G | Glycine | GGU or GGC or GGG |
| V | Valine | GUC or GUU or GUG |
| D | Aspartic acid | GAC or GAU |
| E | Glutamic acid | GAG |
| I | Isoleucine | AUC or AUU |
| T | Threonine | ACU or ACC or ACG |
| N | Asparagine | AAC or AAU |
| K | Lysine | AAG |
| S | Serine | UCU or UCC or UCG |
| R | Arginine | CGU or CGC or CGG |
| L | Leucine | CUG or CUC or CUU |
| P | Proline | CCG or CCU or CCC |
| H | Histidine | CAC or CAU |
| Q | Glutamine | CAG |
| F | Phenylalanine | UUC or UUU |
| Y | Tyrosine | UAC or UAU |
| C | Cysteine | UGC or UGU |
| W | Tryptophan | UGG |
| M | Methionine | AUG |

[1707] In some embodiments, a nucleic acid is provided that encodes an RNA-guided DNA-binding agent, e.g. a Cas9 nuclease such as an S. pyogenes Cas9, comprising an ORF consisting of a set of codons of which at least about 75%, 80%, 85%, 90%, 95%, 98%, 99%, or 100% of the codons are codons listed in Table 4. In some embodiments, the ORF has minimal nucleotide homopolymers, e.g., repetitive strings of the same nucleotides. For example, in some embodiments, when selecting a minimal uridine codon from the codons listed in Table 4, a nucleic acid is constructed by selecting the minimal adenine codons that reduce the number and length of nucleotide homopolymers, e.g., selecting GCG instead of GCC for alanine or selecting GGC instead of GGG for glycine.

[1708] In any of the foregoing embodiments, the nucleic acid may be an mRNA.

[1709] In some embodiments, at least 75%, 80%, 85%, 90%, 95%, 96%, 97%, 98%, 99%, or 100% of the codons in an ORF are codons from a codon set shown in Table 5 (e.g., the low U, low A, or low A/U codon set). The codons in the low U, low A, and low A/U sets use codons that minimize the indicated nucleotides while also using codons corresponding to highly expressed tRNAs where more than one option is available. In some embodiments, at least 75%, 80%, 85%, 90%, 95%, 96%, 97%, 98%, 99%, or 100% of the codons in an ORF are codons from the low U codon set shown in Table 5. In some embodiments, at least 75%, 80%, 85%, 90%, 95%, 96%, 97%, 98%, 99%, or 100% of the codons in an ORF are codons from the low A codon set shown in Table 5. In some embodiments, at least 75%, 80%, 85%, 90%, 95%, 96%, 97%, 98%, 99%, or 100% of the codons in an ORF are codons from the low A/U codon set shown in Table 5.

TABLE 5
Exemplary Codon Sets

| Amino | | | | Long Half |
|---|---|---|---|---|
| Acid | Low U | Low A | Low A/U | Life |
| Gly | GGC | GGC | GGC | GGT |
| Glu | GAG | GAG | GAG | GAA |
| Asp | GAC | GAC | GAC | GAC |
| Val | GTG | GTG | GTG | GTC |
| Ala | GCC | GCC | GCC | GCC |
| Arg | AGA | CGG | CGG | AGA |
| Ser | AGC | TCC | AGC | TCT |
| Lys | AAG | AAG | AAG | AAG |
| Asn | AAC | AAC | AAC | AAC |
| Met | ATG | ATG | ATG | ATG |
| Ile | ATC | ATC | ATC | ATC |
| Thr | ACC | ACC | ACC | ACC |
| Trp | TGG | TGG | TGG | TGG |
| Cys | TGC | TGC | TGC | TGC |
| Tyr | TAC | TAC | TAC | TAC |
| Leu | CTG | CTG | CTG | TTG |
| Phe | TTC | TTC | TTC | TTC |
| Gln | CAG | CAG | CAG | CAA |
| His | CAC | CAC | CAC | CAC |

[1710] Exemplary Sequences

[1711] In some embodiments, the ORF encoding the RNA-guided DNA binding agent comprises a sequence with at least 90%, 93%, 95%, 96%, 97%, 98%, 99%, 99.5%, or 100% identity to any one of SEQ ID NOs: 3502-3522, 3525, 3526, or 3529-3546; and/or the ORF has at least 90%, 93%, 95%, 96%, 97%, 98%, 99%, 99.5%, or 100% identity to any one of SEQ ID NOs: 3502-3522, 3525, 3526, or 3529-3546 over at least its first 50, 200, 250, or 300 nucleotides, or at least 95% identity to any one of SEQ ID NOs: 3502-3522, 3525, 3526, or 3529-3546 over at least its first 30, 50, 70, 100, 150, 200, 250, or 300 nucleotides; and/or the ORF consists of a set of codons of which at least 95%, 96%, 97%, 98%, 99%, 99.5%, or 100% of the codons are codons listed in Table 4 or 5; and/or the ORF has an adenine content ranging from its minimum adenine content to 123% of the minimum adenine content; and/or the ORF has an adenine dinucleotide content ranging from its minimum adenine dinucleotide content to 150% of the minimum adenine dinucleotide content. In some embodiments, the polynucleotide encoding the RNA-guided DNA binding agent comprises a sequence with at least 95%, 96%, 97%, 98%, 99%, 99.5%, or 100% identity to any one of SEQ ID NOs: 3502-3522, 3525, 3526, or 3529-3546.

[1712] In some embodiments, the mRNA comprises a sequence with at least 90% identity to any one of SEQ ID NOs: 3501, 3523, 3524, or 3527, wherein the sequence comprises an ORF encoding an RNA-guided DNA binding agent. In some embodiments, the mRNA comprises a sequence with at least 90% identity to any one of SEQ ID NOs: 3501, 3523, 3524, or 3527, wherein the sequence comprises an ORF encoding an RNA-guided DNA binding agent, wherein the first three nucleotides of SEQ ID NOs: 3501, 3523, 3524, or 3527 are omitted. In some embodiments, the mRNA comprises a sequence with at least 90% identity to any one of SEQ ID NOs: 3501, 3523, 3524, or 3527, wherein the sequence comprises an ORF encoding an RNA-guided DNA binding agent, wherein the first three nucleotides of SEQ ID NOs: 3501, 3523, 3524, or 3527 are omitted and/or the ORF coding sequence contained within SEQ ID NO: 3501, 3523, 3524, or 3527 is substituted with the coding sequence of any one of SEQ ID NOs: 3502-3522, 3525, 3526, or 3529-3546. In some embodiments, any of the foregoing levels of identity is at least 95%, at least 98%, at least 99%, or 100%.

### Methods of Gene Modulation

[1713] In some embodiments, any one or more of the gRNAs (e.g., sgRNAs, short-sgRNAs, dgRNAs, or crRNAs), compositions, or pharmaceutical formulations described herein is for use in preparing a medicament for treating or preventing a disease or disorder in a subject.

[1714] In some embodiments, the invention comprises a method of treating or preventing a disease or disorder in subject comprising administering any one or more of the gRNAs (e.g., sgRNAs, short-sgRNAs, dgRNAs, or crRNAs), compositions, or pharmaceutical formulations described herein.

[1715] In some embodiments, the invention comprises a method or use of modifying a target DNA comprising, administering or delivering any one or more of the gRNAs (e.g., sgRNAs, short-sgRNAs, dgRNAs, or crRNAs), compositions, or pharmaceutical formulations described herein.

[1716] In some embodiments, the invention comprises a method or use for modulation of a target gene comprising, administering or delivering any one or more of the gRNAs (e.g., sgRNAs, short-sgRNAs, dgRNAs, or crRNAs), compositions, or pharmaceutical formulations described herein. In some embodiments, the modulation is editing of the target gene. In some embodiments, the modulation is a change in expression of the protein encoded by the target gene.

[1717] In some embodiments, the method or use results in gene editing. In some embodiments, the method or use results in a double-stranded break within the target gene. In some embodiments, the method or use results in formation of indel mutations during non-homologous end joining of the DSB. In some embodiments, the method or use results in an insertion or deletion of nucleotides in a target gene. In some embodiments, the insertion or deletion of nucleotides in a target gene leads to a frameshift mutation or premature stop codon that results in a non-functional protein. In some embodiments, the insertion or deletion of nucleotides in a target gene leads to a knockdown or elimination of target gene expression. In some embodiments, the method or use comprises homology directed repair of a DSB. In some embodiments, the method or use further comprises delivering to the cell a template, wherein at least a part of the template incorporates into a target DNA at or near a double strand break site induced by the nuclease.

[1718] In some embodiments, the method or use results in gene modulation. In some embodiments, the gene modulation is an increase or decrease in gene expression, a change in methylation state of DNA, or modification of a histone subunit. In some embodiments, the method or use results in increased or decreased expression of the protein encoded by the target gene.

[1719] The efficacy of gRNAs (e.g., sgRNAs, short-sgRNAs, dgRNAs, or crRNAs) can be tested in vitro and in vivo. In some embodiments, the invention comprises one or more of the gRNAs (e.g., sgRNAs, short-sgRNAs, dgRNAs, or crRNAs), compositions, or pharmaceutical formulations described herein, wherein the short-sgRNA results in gene modulation when provided to a cell together with Cas9 or mRNA encoding Cas9. In some embodiments, the efficacy of short-sgRNA can be measured in vitro or in vivo.

[1720] In some embodiments, the activity of a Cas RNP comprising a short-sgRNA is compared to the activity of a Cas RNP comprising an unmodified sgRNA or a reference sgRNA lacking modifications present in the sgRNA or short-sgRNA, such as YA site modifications.

[1721] In some embodiments, the efficiency of a sgRNA or short-sgRNA in increasing or decreasing target protein expression is determined by measuring the amount of target protein.

[1722] In some embodiments, the efficiency of editing with specific gRNAs is determined by the editing present at the target location in the genome following delivery of Cas9 and the gRNA. In some embodiments, the efficiency of editing with specific gRNAs is measured by next-generation sequencing. In some embodiments, the editing percentage of the target region of interest is determined. In some embodiments, the total number of sequence reads with insertions or deletions of nucleotides into the target region of interest over the total number of sequence reads is measured following delivery of a gRNA and Cas9.

[1723] In some embodiments, the efficiency of editing with specific gRNAs is measured by the presence of insertions or deletions of nucleotides introduced by successful gene editing. In some embodiments, activity of a Cas9 and gRNAs is tested in biochemical assays. In some embodiments, activity of a Cas9 and gRNAs is tested in a cell-free cleavage assay. In some embodiments, activity of a Cas9 and gRNAs is tested in Neuro2A cells.

[1724] In some embodiments, the activity of modified gRNAs is measured after in vivo dosing of LNPs comprising modified gRNAs and Cas protein or mRNA encoding Cas protein.

[1725] In some embodiments, in vivo efficacy of a gRNA or composition provided herein is determined by editing efficacy measured in DNA extracted from tissue (e.g., liver tissue) after administration of gRNA and Cas9.

[1726] In some embodiments, activation of the subject's immune response is measured by serum concentrations of cytokine(s) following in vivo dosing of sgRNA together with Cas9 mRNA or protein (e.g., formulated in a LNP). In some embodiments, the cytokine is interferon-alpha (IFN-alpha), interleukin 6 (IL-6), monocyte chemotactic protein 1 (MCP-1), and/or tumor necrosis factor alpha (TNF-alpha).

[1727] In some embodiments, administration of Cas RNP or Cas9 mRNA together with the modified gRNA (e.g., sgRNA, short-sgRNA, or dgRNA) produces lower serum concentration(s) of immune cytokines compared to administration of unmodified sgRNA. In some embodiments, the invention comprises a method of reducing a subject's serum concentration of immune cytokines comprising, administering any one of the gRNAs disclosed herein, wherein the gRNA produces a lower concentration of immune cytokines in a subject's serum as compared to a control gRNA that is not similarly modified.

LNP Delivery of gRNA

[1728] Lipid nanoparticles (LNPs) are a well-known means for delivery of nucleotide and protein cargo, and may be used for delivery of the gRNAs (e.g., sgRNAs, short-sgRNAs, dgRNAs, or crRNAs), compositions, or pharmaceutical formulations disclosed herein. In some embodiments, the LNPs deliver nucleic acid, protein, or nucleic acid together with protein.

[1729] In some embodiments, the invention comprises a method for delivering any one of the gRNAs (e.g., sgRNAs, short-sgRNAs, dgRNAs, or crRNAs) disclosed herein to a subject, wherein the gRNA is associated with an LNP. In some embodiments, the gRNA/LNP is also associated with a Cas9 or an mRNA encoding Cas9.

[1730] In some embodiments, the invention comprises a composition comprising any one of the gRNAs disclosed and an LNP. In some embodiments, the composition further comprises a Cas9 or an mRNA encoding Cas9.

[1731] In some embodiments, the LNPs comprise cationic lipids. In some embodiments, the LNPs comprise (9Z,12Z)-3-((4,4-bis(octyloxy)butanoyl)oxy)-2-((((3-(diethylamino)propoxy)carbonyl)oxy)methyl)propyl octadeca-9,12-dienoate, also called 3-((4,4-bis(octyloxy)butanoyl)oxy)-2-((((3-(diethylamino)propoxy)carbonyl)oxy)methyl)propyl (9Z,12Z)-octadeca-9,12-dienoate). In some embodiments, the LNPs comprise molar ratios of a cationic lipid amine to RNA phosphate (N:P) of about 4.5.

[1732] In some embodiments, LNPs associated with the gRNAs disclosed herein are for use in preparing a medicament for treating a disease or disorder.

[1733] Electroporation is a well-known means for delivery of cargo, and any electroporation methodology may be used for delivery of any one of the gRNAs disclosed herein. In some embodiments, electroporation may be used to deliver any one of the gRNAs disclosed herein and Cas9 or an mRNA encoding Cas9.

[1734] In some embodiments, the invention comprises a method for delivering any one of the gRNAs disclosed herein to an ex vivo cell, wherein the gRNA is associated with an LNP or not associated with an LNP. In some embodiments, the gRNA/LNP or gRNA is also associated with a Cas9 or an mRNA encoding Cas9.

[1735] This description and exemplary embodiments should not be taken as limiting. For the purposes of this specification and appended claims, unless otherwise indicated, all numbers expressing quantities, percentages, or proportions, and other numerical values used in the specification and claims, are to be understood as being modified in all instances by the term “about,” to the extent they are not already so modified. “About” indicates a degree of variation that does not substantially affect the properties of the described subject matter, e.g., within 10%, 5%, 2%, or 1%. Accordingly, unless indicated to the contrary, the numerical parameters set forth in the following specification and attached claims are approximations that may vary depending upon the desired properties sought to be obtained. At the very least, and not as an attempt to limit the application of the doctrine of equivalents to the scope of the claims, each numerical parameter should at least be construed in light of the number of reported significant digits and by applying ordinary rounding techniques.

[1736] It is noted that, as used in this specification and the appended claims, the singular forms “a,” “an,” and “the,” and any singular use of any word, include plural referents unless expressly and unequivocally limited to one referent. As used herein, the term “include” and its grammatical variants are intended to be non-limiting, such that recitation of items in a list is not to the exclusion of other like items that can be substituted or added to the listed items.

### EXAMPLES

[1737] The following examples are provided to illustrate certain disclosed embodiments and are not to be construed as limiting the scope of this disclosure in any way.

### Example 1—Materials and Methods

[1738] Synthetic sgRNA and Short-Single Guide RNA (Short-sgRNA)

[1739] Single-guide RNA (sgRNA) and short-single guide (short-sgRNA) was chemically synthesized by commercial vendors or using standard in vitro synthesis techniques with modified nucleotides as provided in Table 1.

In Vitro Transcription (“IVT”) of Cas9 mRNA

[1740] Capped and polyadenylated Cas9 mRNA containing N1-methyl pseudouridine was generated by in vitro transcription using a linearized plasmid DNA template and T7 RNA polymerase. Plasmid DNA containing a T7 promoter and a sequence for transcription (for producing mRNA comprising an mRNA described herein (see SEQ ID NOs: 3499, 3500, 3501, 3523, 3524, and 3527 for exemplary transcripts and SEQ ID NOs: 3502-3522, 3525, 3526, and 3529-3546 for exemplary ORFs) was linearized by incubating at 37° C. to complete digestion with XbaI with the following conditions. The XbaI may be heat inactivated. The linearized plasmid was purified from enzyme and buffer salts and analyzed by agarose gel to confirm linearization. The IVT reaction to generate Cas9 modified mRNA was incubated at 37° C. for 2-4 hours in the following conditions: 50 ng/μL linearized plasmid; 2 mM each of GTP, ATP, CTP, and N1-methyl pseudo-UTP (Trilink); 10 mM ARCA (Trilink); 5 U/μL T7 RNA polymerase (NEB); 1 U/μL Murine RNase inhibitor (NEB); 0.004 U/μL inorganic E. coli pyrophosphatase (NEB); and 1× reaction buffer. After the 4-hour incubation, TURBO DNase (ThermoFisher) was added to a final concentration of 0.01 U/μL, and the reaction was incubated for an additional 30 minutes to remove the DNA template. The Cas9 mRNA was purified from enzyme and nucleotides using a MegaClear Transcription Clean-up kit per the manufacturer's protocol (ThermoFisher). Alternatively, the mRNA was purified through a precipitation protocol, which in some cases was followed by HPLC-based purification. Briefly, after the DNase digestion, the mRNA was precipitated by adding 0.21× volume of a 7.5 M LiCl solution and mixing, and the precipitated mRNA was pelleted by centrifugation. Once the supernatant was removed, the mRNA was reconstituted in water. The mRNA was precipitated again using ammonium acetate and ethanol. 5M Ammonium acetate was added to the mRNA solution for a final concentration of 2M along with 2× volume of 100% EtOH. The solution was mixed and incubated at −20° C. for 15 min. The precipitated mRNA was again pelleted by centrifugation, the supernatant was removed, and the mRNA was reconstituted in water. As a final step, the mRNA was precipitated using sodium acetate and ethanol. 1/10 volume of 3 M sodium acetate (pH 5.5) was added to the solution along with 2× volume of 100% EtOH. The solution was mixed and incubated at −20° C. for 15 min. The precipitated mRNA was again pelleted by centrifugation, the supernatant was removed, the pellet was washed with 70% cold ethanol and allowed to air dry. The mRNA was reconstituted in water. For HPLC purified mRNA, after the LiCl precipitation and reconstitution, the mRNA was purified by RP-IP HPLC (see, e.g., Kariko, et al. Nucleic Acids Research, 2011, Vol. 39, No. 21 e142). The fractions chosen for pooling were combined and desalted by sodium acetate/ethanol precipitation as described above. The transcript concentration was determined by measuring the light absorbance at 260 nm (Nanodrop), and the transcript was analyzed by capillary electrophoresis by Bioanalyzer (Agilent).

Cas9 mRNA and gRNA Transfections in Neuro2A Cells

[1741] The mouse cell line Neuro2A was cultured in DMEM media supplemented with 10% fetal bovine serum and was plated at a density of 15,000 cells/well in a 96-well plate 24 hours prior to transfection. On the day of transfection, the media was aspirated from cells and replaced with fresh media. Lipofectamine-2000 (Invitrogen) was diluted 1:50 (v/v) in Opti-MEM (Invitrogen). Cas9 mRNA and guide RNA were diluted separately in Opti-MEM. Both Cas9 mRNA and gRNA were mixed separately 1:1 (v/v) with diluted Lipofectamine-2000, producing two lipoplexes. After 5 minutes of incubation, lipoplexes were added in succession to cells, for a final concentration of 100 ng Cas9 mRNA and 0.4 μL total lipofection reagent per well. Guides were tested at four dose levels, including 3 nM, 0.3 nM, 0.03 nM, and 0.003 nM. Cells were lysed 24 hours post transfection, and lysates were used directly in the PCR reaction that was analyzed for editing by NGS.

### Primary Hepatocytes

[1742] Primary human liver hepatocytes (PHH), primary cynomolgus liver hepatocytes (PCH), or primary mouse liver hepatocytes (PMH) (Thermo Fisher) were cultured per the manufacturer's protocol (Invitrogen, protocol 11.28.2012). In brief, the cells were thawed and resuspended in hepatocyte thawing medium (Thermo Fisher, Cat. CM7000) followed by centrifugation at 100 g for 10 minutes for PHH, 100 g for 4 min for PMH, or 80 g for 4 minutes for PCH. The supernatant was discarded and the pelleted cells resuspended in hepatocyte plating medium plus supplement pack (Invitrogen, Cat. A1217601 and CM3000). Cells were counted and plated on Bio-coat collagen I coated 96-well plates (Thermo Fisher, Cat. 877272) at a density of 30,000-35,000 cells/well for PHH, 50,000-60,000 cells/well for PCH, or 15,000-20,000 cells/well for PMH. Plated cells were allowed to settle and adhere for 4 to 6 hours in a tissue culture incubator at 37° C. and 5% CO₂ atmosphere. After incubation, cells were checked for monolayer formation. Cells were then washed with hepatocyte maintenance media/culture media with serum-free supplement pack (Invitrogen, Cat. A1217601 and CM4000) and then fresh hepatocyte maintenance media was added on to the cells

[1743] For lipoplex transfection experiments, Lipofectamine RNAiMax (ThermoFisher, Cat. 13778150) based transfections were conducted as per the manufacturer's protocol. Cells were transfected with a single lipoplex containing Spy Cas9 mRNA (100 ng for PMH, 50 ng for PHH and 25 ng for PCH) and OptiMem sgRNA (25 nM for PMH, 12.5 nM for PHH and 0.125 nM for PCH) and OptiMem and Lipofectamine RNAiMax (1 μL/well for PHH and PCH both and 2 uL/well for PMH).

[1744] For experiments involving LNP treatment, after 4-6 hours, the plating media was removed, cells were then washed with hepatocyte maintenance media/culture media with serum-free supplement pack (Invitrogen, Cat. A1217601 and CM4000), and replaced with supplemented hepatocyte culture medium (Invitrogen, Cat. A1217601 and CM4000) containing LNP formulated Cas9 mRNA and guide RNA plus 3% serum. LNPs were diluted from a starting dose level of 100 ng Cas9 mRNA and approximately 30 nM guide RNA per well, carrying out serial dilutions down to 0.1 ng mRNA and 0.03 nM guide per well. Cells were incubated for approximately 72 hours at 37° C. and 5% CO₂ atmosphere before cell lysis and NGS analysis as described herein.

### HepG2

[1745] The human hepatocellular carcinoma cell line HepG2 (American Type Culture Collection, Cat. HB-8065) was cultured in DMEM media containing penstrep supplemented with 10% fetal bovine serum. Cells were counted and plated on Bio-coat collagen I coated 96-well plates (ThermoFisher, Cat. 877272) at a density of 10,000 cells/well in a 96-well plate 24 hours prior to transfection.

[1746] After 4-6 hours, the plating media was removed, cells were then washed with hepatocyte maintenance media/culture media with serum-free supplement pack (Invitrogen, Cat. A1217601 and CM4000), and replaced with supplemented hepatocyte culture medium (Invitrogen, Cat. A1217601 and CM4000) containing LNP formulated Cas9 mRNA and guide RNA plus 3% serum. LNPs were diluted from a starting dose level of 100 ng Cas9 mRNA and approximately 30 nM guide RNA per well, carrying out serial dilutions down to 0.1 ng mRNA and 0.03 nM guide per well. Cells were incubated for approximately 72 hours at 37° C. and 5% CO₂ atmosphere before cell lysis and NGS analysis as described herein.

### Lipid Nanoparticle (“LNP”) Formulation

[1747] LNP Procedure A: LNPs were formulated with a cationic lipid amine to RNA phosphate (N:P) molar ratio of about 4.5. The lipid nanoparticle components were dissolved in 100% ethanol with the following molar ratios: 45 mol-% (12.7 mM) cationic lipid (e.g., (9Z,12Z)-3-((4,4-bis(octyloxy)butanoyl)oxy)-2-((((3-(diethylamino)propoxy)-carbonyl)oxy)methyl)propyl octadeca-9,12-dienoate, also called 3-((4,4-bis(octyloxy)-butanoyl)oxy)-2-((((3-(diethylamino)propoxy)carbonyl)oxy)methyl)propyl (9Z,12Z)-octadeca-9,12-dienoate); 44 mol-% (12.4 mM) helper lipid (e.g., cholesterol); 9 mol-% (2.53 mM) neutral lipid (e.g., DSPC); and 2 mol-% (0.563 mM) PEG (e.g., PEG2k-DMG).

[1748] The LNPs were formed by microfluidic mixing of the lipid and RNA solutions using a Precision Nanosystems NanoAssemblr™ Benchtop Instrument, according to the manufacturer's protocol. A 2:1 ratio of aqueous to organic solvent was maintained during mixing using differential flow rates.

[1749] The RNA cargo were prepared in 25 mM sodium acetate buffer, pH 4.5, resulting in a concentration of RNA cargo of approximately 0.45 mg/mL, with a ratio of Cas9 mRNA:sgRNA of 1:1 (wt/wt). After mixing, the LNPs were collected, diluted in 50 mM Tris at pH 7.5 (approximately 1:1), and then LNPs were exchanged into 50 mM Tris at pH 7.5 (100-fold excess of sample volume), overnight at 4° C. under gentle stirring using a 10 kDa Slide-a-Lyzer™ G2 Dialysis Cassette (ThermoFisher Scientific). The LNPs were concentrated using 10 kDa Amicon spin filter (centrifugation at 4000 g at 4° C.) to achieve twice the desired concentration. These concentrated LNPs were mixed 1:1 with 50 mM Tris, 90 mM NaCl, 10% sucrose at pH 7.5 (2× TSS). The resulting mixture was then filtered using a 0.2 μM sterile filter. The resulting filtrate was stored at 2-8° C.

[1750] LNP Procedure B: LNPs were formulated with a cationic lipid amine to RNA phosphate (N:P) molar ratio of about 4.5. The lipid nanoparticle components were dissolved in 100% ethanol with the following molar ratios: 45 mol-% (12.7 mM) cationic lipid (e.g., (9Z,12Z)-3-((4,4-bis(octyloxy)butanoyl)oxy)-2-((((3-(diethylamino)propoxy)-carbonyl)oxy)methyl)propyl octadeca-9,12-dienoate, also called 3-((((4-bis(octyloxy)-butanoyl)oxy)-2-((((3-(diethylamino)propoxy)carbonyl)oxy)methyl)propyl (9Z,12Z)-octadeca-9,12-dienoate); 44 mol-% (12.4 mM) helper lipid (e.g., cholesterol); 9 mol-% (2.53 mM) neutral lipid (e.g., DSPC); and 2 mol-% (0.563 mM) PEG (e.g., PEG2k-DMG).

[1751] The LNPs were formed by microfluidic mixing of the lipid and RNA solutions using a Precision Nanosystems NanoAssemblr™ Benchtop Instrument, according to the manufacturer's protocol. A 2:1 ratio of aqueous to organic solvent was maintained during mixing using differential flow rates.

[1752] The RNA cargo were prepared in 25 mM sodium citrate, 100 mM sodium chloride at pH 5 resulting in a concentration of RNA cargo of approximately 0.45 mg/mL. After mixing, the LNPs were collected in water at the ratio of 3:1. The LNPs were incubated for an hour at room temperature and mixed 1:1 with water. Then they were buffer-exchanged into 1× TSS (50 mM Tris, 45 mM NaCl, 5% sucrose at pH 7.5) on PD-10 columns (GE Healthcare), using manufacturer's protocol. The LNPs were concentrated using 10 kDa Amicon spin filter (centrifugation at 4000 g at 4° C.) to achieve the desired concentration. The resulting mixture was then filtered using a 0.2 μm sterile filter. The resulting filtrate was stored at −80° C.

[1753] LNP Procedure C: LNPs were formulated with a cationic lipid amine to RNA phosphate (N:P) molar ratio of about 6. The lipid nanoparticle components were dissolved in 100% ethanol with the following molar ratios: 50 mol-% (12.7 mM) cationic lipid (e.g., (9Z,12Z)-3-((4,4-bis(octyloxy)butanoyl)oxy)-2-((((3-(diethylamino)propoxy)-carbonyl)oxy)methyl)propyl octadeca-9,12-dienoate, also called 3-((4,4-bis(octyloxy)-butanoyl)oxy)-2-((((3-(diethylamino)propoxy)carbonyl)oxy)methyl)propyl (9Z,12Z)-octadeca-9,12-dienoate); 38 mol-% (12.4 mM) helper lipid (e.g., cholesterol); 9 mol-% (2.53 mM) neutral lipid (e.g., DSPC); and 3 mol-% (0.563 mM) PEG (e.g., PEG2k-DMG).

[1754] The LNPs were formed by microfluidic mixing of the lipid and RNA solutions using a Precision Nanosystems NanoAssemblr™ Benchtop Instrument, according to the manufacturer's protocol. A 2:1 ratio of aqueous to organic solvent was maintained during mixing using differential flow rates.

[1755] The RNA cargo was prepared in 25 mM sodium citrate, 100 mM sodium chloride at pH 5 resulting in a concentration of RNA cargo of approximately 0.45 mg/mL. LNPs were formed by an impinging jet mixing method where one stream of lipids in ethanol were mixed with two streams of RNA in citrate buffer through a 0.25 mm ID Cross piece. The two RNA streams mix perpendicular to the ethanol stream. A fourth stream of water for injection (WFI) meets the resulting particles in an in-line dilution through a 0.5 mm ID Tee piece. All four streams are delivered at 10 mL/min using a syringe pump. These LNPs were incubated for an hour at room temperature and then they were buffer-exchanged into 1× TSS (50 mM Tris, 45 mM NaCl, 5% sucrose at pH 7.5) on PD-10 columns (GE Healthcare), using manufacturer's protocol. The LNPs were concentrated using 10 kDa Amicon spin filter (centrifugation at 4000 g at 4° C.) to achieve the desired concentration. The resulting mixture was then filtered using a 0.2 μm sterile filter. The resulting filtrate was stored at −80° C.

[1756] LNP Procedure D: LNPs were formulated with a cationic lipid amine to RNA phosphate (N:P) molar ratio of about 4.5. The lipid nanoparticle components were dissolved in 100% ethanol with the following molar ratios: 45 mol-% (12.7 mM) cationic lipid (e.g., (9Z,12Z)-3-((4,4-bis(octyloxy)butanoyl)oxy)-2-((((3-(diethylamino)propoxy)carbonyl)oxy)methyl)propyl octadeca-9,12-dienoate, also called 3-((4,4-bis(octyloxy)butanoyl)oxy)-2-((((3-(diethylamino)propoxy)carbonyl)oxy)methyl)propyl (9Z,12Z)-octadeca-9,12-dienoate); 44 mol-% (12.4 mM) helper lipid (e.g., cholesterol); 9 mol-% (2.53 mM) neutral lipid (e.g., DSPC); and 2 mol-% (0.563 mM) PEG (e.g., PEG2k-DMG). The RNA cargo were prepared in 25 mM sodium acetate buffer, pH 4.5, resulting in a concentration of RNA cargo of approximately 0.45 mg/mL, with a ratio of Cas9 mRNA: sgRNA of 1:1 (wt/wt).

[1757] LNPs were prepared using a cross-flow technique by impinging jet mixing of the lipid in ethanol with two volumes of RNA solutions and one volume of water. The lipid in ethanol is mixed through a mixing cross with the two volumes of RNA solution. A fourth stream of water is mixed with the outlet stream of the cross through an inline tee. (See WO2016010840 FIG. 2.) The LNPs were held for 1 hour at room temperature, and further diluted with water (approximately 1:1 v/v). Diluted LNPs were concentrated using tangential flow filtration on a flat sheet cartridge (Sartorius, 100 kD MWCO) and then buffer exchanged by diafiltration into 50 mM Tris, 45 mM NaCl, 5% (w/v) sucrose, pH 7.5 (TSS). Alternatively, the final buffer exchange into TSS was completed with PD-10 desalting columns (GE). If required, formulations were concentrated by centrifugation with Amicon 100 kDa centrifugal filters (Millipore). The resulting mixture was then filtered using a 0.2 μm sterile filter. The final LNP was stored at 4° C. or -80° C. until further use.

### Next-Generation Sequencing (“NGS”) and Analysis for On-Target Cleavage Efficiency

[1758] To quantitatively determine the efficiency of editing at the target location in the genome, deep sequencing was utilized to identify the presence of insertions and deletions introduced by gene editing.

[1759] PCR primers were designed around the target site (e.g., within the target gene of interest (e.g., TTR)), and the genomic area of interest was amplified.

[1760] Additional PCR was performed according to the manufacturer's protocols (Illumina) to add the necessary chemistry for sequencing. The amplicons were sequenced on an Illumina MiSeq instrument. The reads were aligned to the human reference genome (e.g., hg38) after eliminating those having low quality scores. The resulting files containing the reads were mapped to the reference genome (BAM files), where reads that overlapped the target region of interest were selected and the number of wild type reads versus the number of reads which contain an insertion, substitution, or deletion was calculated.

[1761] The editing percentage (e.g., the “editing efficiency” or “percent editing”) is defined as the total number of sequence reads with insertions or deletions over the total number of sequence reads, including wild type.

### LNP Delivery In Vivo

[1762] CD-1 female mice, ranging 6-10 weeks of age were used in each study involving mice. Sprague-Dawley female rats, ranging 6-10 weeks of age were used in each study involving rats. Animals were weighed and grouped according to body weight for preparing dosing solutions based on group average weight. LNPs were dosed via the lateral tail vein in a volume of 0.2 mL per animal (approximately 10 mL per kilogram body weight). The animals were observed at approximately 6 hours post dose for adverse effects. Body weight was measured at twenty-four hours post-administration, and animals were euthanized at various time points by exsanguination via cardiac puncture under isoflourane anesthesia. Blood was collected into serum separator tubes or into tubes containing buffered sodium citrate for plasma as described herein. For studies involving in vivo editing, liver tissue was collected from the median lobe from each animal for DNA extraction and analysis.

### Genomic DNA Isolation

[1763] For the in vivo studies, genomic DNA was extracted from 10 mg of tissue using a bead-based extraction kit, MagMAX-96 DNA Multi-Sample Kit (ThermoFisher, Cat #4413020) according to the manufacturer's protocol, which includes homogenizing the tissue in lysis buffer (approximately 400 μL/10 mg tissue). All DNA samples were normalized to 100 ng/μL concentration for PCR and subsequent NGS analysis, as described herein.

### Transthyretin (TTR) ELISA Analysis Used in Animal Studies

[1764] Blood was collected, and the serum was isolated as indicated. The total TTR serum levels were determined using a Mouse Prealbumin (Transthyretin) ELISA Kit (Aviva Systems Biology, Cat. OKIA00111); rat TTR serum levels were measured using a rat specific ELISA kit (Aviva Systems Biology catalog number OKIA00159). Kit reagents and standards were prepared according to the manufacturer's protocol. Mouse serum was diluted to a final dilution of 10,000-fold with 1× assay diluent. This was done by carrying out two sequential 50-fold dilutions resulting in a 2500-fold dilution. A final 4-fold dilution step was carried out for a total sample dilution of 10,000-fold. Both standard curve dilutions (100 μL each) and diluted serum samples were added to each well of the ELISA plate pre-coated with capture antibody. The plate was incubated at room temperature for 30 minutes before washing. Enzyme-antibody conjugate (100 μL per well) was added for a 20-minute incubation. Unbound antibody conjugate was removed and the plate was washed again before the addition of the chromogenic substrate solution. The plate was incubated for 10 minutes before adding 100 μL of the stop solution, e.g., sulfuric acid (approximately 0.3 M). The plate was read on a SpectraMax M5 plate reader at an absorbance of 450 nm. Serum TTR levels were calculated by SoftMax Pro software ver. 6.4.2 using a four parameter logistic curve fit off the standard curve. Final serum values were adjusted for the assay dilution. Percent knockdown (% KD) values were determined relative to controls, which generally were animals sham-treated with vehicle (transport and storage solution or TSS) unless otherwise indicated.

### Nuclease Susceptibility Assays

[1765] Assays to determine and quantify where sgRNA cleavage occurs upon exposure to hepatocyte cytosol and to assess the effect of sgRNA modifications on stability were performed as follows. sgRNAs at 15 μM were incubated with human liver cytosol (XenoTech Product H0610.C) (adjusted to 0.01 mg/mL final protein concentration using pH 7.4 phosphate-buffered saline unless otherwise indicated) for a time period as indicated below. Reactions were stopped by adding 67 μL of proteinase K cell lysis buffer solution, which consisted of 3.230 mL water, 2.125 mL of tissue and cell lysis solution (Epicentre Product MTC096H), and 340 μL of proteinase K (50 mg/mL from Epicentre Product MPRK092) and incubating for 30 minutes at 65° C. in a thermo-mixer shaking at 750 RPM. 8 μL of 3M KCl was then added and the mixture was incubated for 10 minutes at 0° C. The mixtures were then centrifuged for 15 minutes at 1500 g to precipitate detergent. The supernatant was removed, diluted with 0.95 mL of dilution buffer (consisting of 0.01% Tween20 in water), and mixed with 1 mL of pH 4.3 loading/dilution buffer (consisting of 10 mM sodium acetate, 10% acetonitrile, 0.01% Tween 20, 10 mM EDTA, and 1 mM TCEP) and the mixture was loaded on a Clarity® OTX™ SPE oligonucleotide purification cartridge. Washes were performed at pH 4.3, 5.5, and about 7, followed by elution at pH 9.0. The eluate was dried under vacuum and resuspended in 100 mM triethyl ammonium acetate (TEAAc).

[1766] Samples were then analyzed by LC/MS.

### Example 2—Modified Dual Guide Survey in HEK293 Cells

[1767] A survey of chemical modification within crRNA was performed to identify negative influence of chemical modification at specific positions on editing efficacy. Each crRNA in this survey targeted the identical sequence within the human BCL11A gene. Test guides contained modifications within the spacer region of the crRNA (positions 1-20 from the 5′ end) limited to either a single modified base or two adjacent bases with the same chemical modification as described in Table 6. Phosophothioate bonds (PS), inosine substitution, DNA bases, 2′OMe modifications, and unlocked nucleic acids (UNA) were assayed.

[1768] The human embryonic kidney adenocarcinoma cell line HEK293 constitutively expressing Spy Cas9 (“HEK293_Cas9”) was cultured in DMEM media supplemented with 10% fetal bovine serum. Cells were plated at a density of 15,000 cells/well in a 96-well plate 20 hours prior to transfection (˜70% confluent at time of transfection). Cells were transfected with Lipofectamine RNAiMAX (ThermoFisher, Cat. 13778150) according to the manufacturer's protocol. Cells were transfected with a lipoplex containing individual crRNA (3.1 nM), trRNA TR000002 (3.1 nM), Lipofectamine RNAiMAX (0.45 μL/well) and OptiMem. Cells were lysed 48 hours post transfection, and lysates were used directly in the PCR reaction that was analyzed for editing by NGS.

[1769] The editing results are shown in Table 6 and FIGS. 29A-F. Editing efficiency was reduced to near background levels by 2′OMe modification at positions 15 and 16 (FIG. 29A). Phosphorothioate dinucleotides reduced editing by roughly 20% when placed at positions 19 and 20 of the spacer region (FIG. 29B). Inosine substitution in the seed region led to moderate negative impact on editing, for instance a roughly 30% decrease when modified at position 14 or a roughly 60% decrease at position 18 (FIG. 29C). UNA base substitution at any single position from position 11 to position 20 severely reduced editing efficacy (FIG. 29D). DNA base substitution at position 15 reduced editing efficiency by about one third (FIG. 29E). DNA base substitution at both positions 15 and 16 reduced editing by about two thirds (FIG. 29F).

TABLE 6
Survey of Chemical Modification in crRNAs

| Modification | | Editing | | Modification | | Editing | |
|---|---|---|---|---|---|---|---|
| & Position | Guide | % | SD | & Position | Guide | % | SD |
| No crRNA | n/a | 0.2% | 0.1% | Inosine 5 | CR007559 | 95.8% | 0.9% |
| Unmodified | CR000309 | 92.2% | 5.9% | Inosine 6 | CR007560 | 94.3% | 1.5% |
| (none) | | | | | | | |
| 2′OMe 1, 2 | CR005084 | 95.0% | 0.5% | Inosine 7 | CR007561 | 94.7% | 0.4% |
| 2′OMe 3, 4 | CR005085 | 97.3% | 1.3% | Inosine 8 | CR007562 | 92.8% | 2.1% |
| 2′OMe 5, 6 | CR005086 | 97.6% | 0.5% | Inosine 9 | CR007563 | 88.1% | 4.2% |
| 2′OMe 7, 8 | CR005087 | 89.5% | 2.3% | Inosine 10 | CR007564 | 91.8% | 4.8% |
| 2′OMe 9, 10 | CR005088 | 90.5% | 1.4% | Inosine 11 | CR007565 | 87.3% | 4.9% |
| 2′OMe 11, 12 | CR005089 | 92.5% | 3.2% | Inosine 12 | CR007566 | 80.9% | 10.3% |
| 2′OMe 13, 14 | CR005090 | 96.2% | 0.4% | Inosine 13 | CR007567 | 78.7% | 5.4% |
| 2′OMe 15, 16 | CR005091 | 1.4% | 2.2% | Inosine 14 | CR007568 | 61.5% | 4.1% |
| 2′OMe 17, 18 | CR005092 | 95.5% | 1.1% | Inosine 15 | CR007569 | 89.6% | 5.3% |
| 2′OMe 19, 20 | CR005093 | 84.1% | 2.2% | Inosine 16 | CR007570 | 72.7% | 10.7% |
| PS 1, 2 | CR005100 | 96.6% | 1.4% | Inosine 17 | CR007571 | 77.9% | 6.1% |
| PS 3, 4 | CR005101 | 97.8% | 0.4% | Inosine 18 | CR007572 | 35.1% | 8.9% |
| PS 5, 6 | CR005102 | 97.3% | 0.2% | Inosine 19 | CR007573 | 69.7% | 3.2% |
| PS 7, 8 | CR005103 | 90.0% | 2.1% | Inosine 20 | CR007574 | 88.1% | 6.0% |
| PS 9, 10 | CR005104 | 89.7% | 0.9% | DNA 1 | CR007575 | 92.3% | 1.9% |
| PS 11, 12 | CR005105 | 93.5% | 1.2% | DNA 2 | CR007576 | 91.8% | 3.5% |
| PS 13, 14 | CR005106 | 86.5% | 1.5% | DNA 3 | CR007577 | 93.3% | 1.9% |
| PS 15, 16 | CR005107 | 90.4% | 5.7% | DNA 4 | CR007578 | 94.0% | 2.2% |
| PS 17, 18 | CR005108 | 91.1% | 1.6% | DNA 5 | CR007579 | 94.0% | 1.3% |
| PS 19, 20 | CR005109 | 72.9% | 0.8% | DNA 6 | CR007580 | 94.1% | 2.6% |
| UNA 1 | CR007531 | 95.1% | 2.2% | DNA 7 | CR007581 | 94.5% | 2.5% |
| UNA 2 | CR007532 | 94.8% | 2.6% | DNA 8 | CR007582 | 94.8% | 1.6% |
| UNA 3 | CR007533 | 91.9% | 4.4% | DNA 9 | CR007583 | 94.6% | 1.1% |
| UNA 4 | CR007534 | 90.4% | 5.2% | DNA 10 | CR007584 | 95.7% | 0.5% |
| UNA 5 | CR007535 | 84.1% | 8.5% | DNA 11 | CR007585 | 93.1% | 2.4% |
| UNA 6 | CR007536 | 87.2% | 7.9% | DNA 12 | CR007586 | 95.0% | 3.0% |
| UNA 7 | CR007537 | 88.7% | 6.0% | DNA 13 | CR007587 | 91.5% | 2.8% |
| UNA 8 | CR007538 | 91.9% | 3.7% | DNA 14 | CR007588 | 88.8% | 3.1% |
| UNA 9 | CR007539 | 90.0% | 7.9% | DNA 15 | CR007589 | 59.8% | 8.6% |
| UNA 10 | CR007540 | 95.2% | 2.2% | DNA 16 | CR007590 | 83.2% | 8.2% |
| UNA 11 | CR007541 | 90.0% | 4.1% | DNA 17 | CR007591 | 93.3% | 3.1% |
| UNA 12 | CR007542 | 13.6% | 9.8% | DNA 18 | CR007592 | 92.0% | 1.8% |
| UNA 13 | CR007543 | 4.6% | 5.9% | DNA 19 | CR007593 | 92.5% | 3.5% |
| UNA 14 | CR007544 | 5.6% | 5.3% | DNA 20 | CR007594 | 86.7% | 3.5% |
| UNA 15 | CR007545 | 0.8% | 1.2% | DNA 1, 2 | CR007595 | 95.8% | 1.9% |
| UNA 16 | CR007546 | 0.2% | 0.2% | DNA 3, 4 | CR007596 | 92.7% | 2.9% |
| UNA 17 | CR007547 | 8.7% | 5.2% | DNA 5, 6 | CR007597 | 88.3% | 8.4% |
| UNA 18 | CR007548 | 2.6% | 2.1% | DNA 7, 8 | CR007598 | 94.4% | 2.4% |
| UNA 19 | CR007549 | 4.0% | 1.8% | DNA 9, 10 | CR007599 | 92.1% | 2.2% |
| UNA 20 | CR007550 | 8.3% | 5.1% | DNA 11, 12 | CR007600 | 93.3% | 2.8% |
| Inosine 1 | CR007555 | 94.9% | 4.3% | DNA 13, 14 | CR007601 | 87.3% | 1.3% |
| Inosine 2 | CR007556 | 95.1% | 0.2% | DNA 15, 16 | CR007602 | 33.9% | 1.6% |
| Inosine 3 | CR007557 | 92.2% | 3.1% | DNA 17, 18 | CR007603 | 90.2% | 3.4% |
| Inosine 4 | CR007558 | 91.8% | 2.9% | DNA 19, 20 | CR007604 | 82.3% | 3.6% |

### Example 3—Representative Dual Guide Screen

[1770] The impacts of chemical modification type and position were evaluated in an editing screen of modified crRNAs. The screen assayed guides modified with 2′F, 2′OMe and PS. The complete pattern set was applied to guides targeting six distinct sites in the TTR gene. The final data set contained 1704 distinct guides and 284 unique modification patterns.

[1771] Guide modification patterns were computationally selected to minimize the number of modification combinations required to explore the large combinatorial space of possible modification patterns. Patterns were chosen to create a uniform distribution of modifications at each individual position and also at each pair of positions, so that no particular position or combination of positions was over-represented in the final set. This bias-minimization approach allowed for testing of individual positional effects as well as for detection of higher-order interaction effects between positions. Appropriate controls were added to the set to control for nuisance effects such as guide domain sequence, transfection efficiency and other experimental variability.

[1772] Each pattern in this set contained only one type of modification on positions 4 to 20; modification types were not mixed within patterns. The final set of patterns consisted of 3 groups of 96 patterns on positions 4 to 20 having 0-4 2′F modifications, 0-4 2′Ome modifications or 0-15 PS modifications. PS modifications were more heavily applied because previous observations indicated that the PS modification is better tolerated than 2′Flu or 2′Ome, and therefore less likely to show detectable effects when present in small numbers.

[1773] The human embryonic kidney adenocarcinoma cell line HEK293 constitutively expressing Spy Cas9 (“HEK293_Cas9”) was cultured in DMEM media supplemented with 10% fetal bovine serum. Cells were plated at a density of 10,000 cells/well in a 96-well plate about 24 hours prior to transfection (˜70% confluent at time of transfection). Cells were transfected with Lipofectamine RNAiMAX (ThermoFisher, Cat. 13778150) according to the manufacturer's protocol. Cells were transfected with a lipoplex containing individual crRNA (25 nM), trRNA TR009880 (25 nM), Lipofectamine RNAiMAX (0.3 μL/well) and OptiMem. Cells were lysed 48 hours post transfection, and lysates were used directly in the PCR reaction that was analyzed for editing by NGS.

[1774] The editing results are described in Table 8. Each row number represents a single modification pattern. The first two rows in the table show controls.

[1775] The overall impact of the modification type, targeting location, and guide domain sequence were evaluated in the modified guides. The data show a wide range of activity within the modified oligonucleotides, from close to 0 to nearly 90% editing. In general, the 2′F modifications were more well-tolerated than 2′OMe or PS modified guides, though the PS guides were more heavily modified, on average, than the other modifications. We observed a clear impact of guide domain's nucleobase sequence on response to modification. G480 and G490 variants were strongly impaired by 2′OMe modifications, but were resistant to 2′F and PS modifications, whereas G494, G499 and G502 variants were most strongly impacted by PS modifications, and less so by 2′OMe, and G488 responded similarly to all three modifications.

[1776] A regression-based analysis was conducted to identify the modification types with significant impact on guide activity. The editing data were first corrected for guide sequence and plate effects prior to modeling. Positional modification impacts were then modeled as independent linearly additive factors using standard regression techniques. A separate analysis examined whether there was evidence of interaction and non-linear relationships among positions. No significant higher-order effects were observed; the results reported below come from the initial linear regression analysis. The editing data for all the modified guides were corrected for guide sequence effects and then modeled for modification impact.

[1777] 2′ modifications at a number of positions displayed negative impacts on editing as shown in Table 7 and FIG. 30A-C. For example, 2′F or 2′OMe modification of positions 15 or 16 resulted in statistically significant inhibition of editing activity, suggesting that gRNAs with ribose at positions 15 and 16 are preferred. In contrast, 2′F modification of position 19 significantly increased editing. The regression model found that this modification added an additional 13% editing over baseline, on average. 2′OMe had the opposite effect, strongly inhibiting editing. No other positions were consistently significantly impactful, although individual sequences were in many cases affected. PS modifications had a possible small negative effect at some positions, including position 19. Highly modified gRNA performed worse than less modified gRNA, indicating that the amount of PS modification may be relevant.

TABLE 7
Editing Influence Scores

| | 2′F | | | 2′Ome | | | PS | | |
|---|---|---|---|---|---|---|---|---|---|
| Position | Score | SE | P value | Score | SE | P value | Score | SE | P value |
| 4 | 0.065 | 0.045 | 0.151 | 0.027 | 0.015 | 0.084 | 0.002 | 0.011 | 0.885 |
| 5 | 0.058 | 0.044 | 0.186 | −0.017 | 0.015 | 0.249 | −0.020 | 0.010 | 0.054 |
| 6 | −0.004 | 0.044 | 0.923 | −0.009 | 0.015 | 0.555 | −0.009 | 0.012 | 0.438 |
| 7 | 0.042 | 0.044 | 0.347 | 0.013 | 0.015 | 0.404 | −0.018 | 0.011 | 0.100 |
| 8 | −0.037 | 0.046 | 0.431 | −0.037 | 0.016 | 0.020 | −0.008 | 0.011 | 0.446 |
| 9 | 0.090 | 0.044 | 0.040 | 0.006 | 0.015 | 0.690 | −0.023 | 0.010 | 0.025 |
| 10 | 0.010 | 0.045 | 0.819 | −0.048 | 0.015 | 0.002 | −0.002 | 0.011 | 0.821 |
| 11 | −0.013 | 0.046 | 0.773 | −0.001 | 0.015 | 0.947 | −0.032 | 0.012 | 0.006 |
| 12 | −0.051 | 0.045 | 0.262 | −0.022 | 0.015 | 0.158 | −0.022 | 0.011 | 0.049 |
| 13 | −0.020 | 0.045 | 0.662 | 0.001 | 0.015 | 0.937 | −0.023 | 0.011 | 0.039 |
| 14 | 0.000 | 0.045 | 0.995 | 0.027 | 0.015 | 0.078 | −0.014 | 0.010 | 0.178 |
| 15 | −0.160 | 0.044 | <4E−4 | −0.201 | 0.015 | <2E−16 | 0.022 | 0.012 | 0.067 |
| 16 | −0.164 | 0.045 | <3E−4 | −0.165 | 0.015 | <2E−16 | 0.010 | 0.011 | 0.378 |
| 17 | −0.050 | 0.045 | 0.266 | −0.043 | 0.015 | 0.005 | −0.023 | 0.011 | 0.047 |
| 18 | 0.026 | 0.043 | 0.545 | −0.001 | 0.015 | 0.930 | −0.013 | 0.011 | 0.259 |
| 19 | 0.131 | 0.044 | 0.003 | −0.098 | 0.015 | <2E−10 | −0.062 | 0.011 | <3E−8 |
| 20 | −0.020 | 0.044 | 0.649 | −0.006 | 0.015 | 0.694 | −0.032 | 0.011 | 0.003 |

TABLE 8
Editing in HEKCas9 cells with modified dgRNA

| G480 Var | Edit | SD | G488 Var | Edit | SD | G490 Var | Edit | SD |
|---|---|---|---|---|---|---|---|---|
| CR09711 | 51.3 | 10.8 | CR10224 | 9.2 | 5.5 | CR10319 | 40.3 | 7.7 |
| CR03353 | 57.5 | 13.9 | CR03346 | 14.2 | 10.3 | CR03366 | 49.3 | 7.7 |
| CR10040 | 70.9 | 13.6 | CR10130 | 16.7 | 2.9 | CR10225 | 74.5 | 6.3 |
| CR10041 | 70.4 | 7.0 | CR10131 | 19.4 | 3.1 | CR10226 | 50.2 | 10.7 |
| CR10042 | 41.9 | 36.5 | CR10132 | 3.8 | 0.6 | CR10227 | 38.4 | 3.8 |
| CR10043 | 72.5 | 6.8 | CR10133 | 14.1 | 2.4 | CR10228 | 61.5 | 2.8 |
| CR10044 | 61.9 | 11.7 | CR10134 | 4.1 | 1.1 | CR10229 | 52.5 | 4.9 |
| CR10045 | 70.0 | 6.7 | CR10135 | 14.0 | 4.6 | CR10230 | 49.7 | 3.7 |
| CR10046 | 79.3 | 6.9 | CR10136 | 9.1 | 1.4 | CR10231 | 53.9 | 3.9 |
| CR10047 | 63.6 | 7.1 | CR10137 | 11.2 | 2.4 | CR10232 | 55.6 | 1.9 |
| CR10048 | 77.1 | 6.2 | CR10138 | 18.3 | 0.8 | CR10233 | 44.6 | 4.2 |
| CR10049 | 71.5 | 8.2 | CR10139 | 15.3 | 0.7 | CR10234 | 37.4 | 2.8 |
| CR10050 | 77.0 | 6.7 | CR10140 | 11.8 | 1.8 | CR10235 | 57.3 | 2.5 |
| CR10051 | 65.6 | 6.1 | CR10141 | 5.5 | 1.1 | CR10236 | 25.8 | 4.7 |
| CR10052 | 65.4 | 4.1 | CR10142 | 5.4 | 1.5 | CR10237 | 25.1 | 2.6 |
| CR10053 | 58.5 | 17.0 | CR10143 | 5.5 | 0.6 | CR10238 | 33.0 | 5.0 |
| CR10054 | 59.0 | 18.4 | CR10144 | 4.2 | 1.2 | CR10239 | 29.7 | 3.6 |
| CR10055 | 50.0 | 14.7 | CR10145 | 5.7 | 2.1 | CR10240 | 27.6 | 5.4 |
| CR10056 | 50.0 | 18.2 | CR10146 | 7.4 | 1.7 | CR10241 | 37.2 | 8.0 |
| CR10057 | 47.2 | 18.0 | CR10147 | 3.9 | 0.2 | CR10242 | 29.4 | 5.6 |
| CR10058 | 37.9 | 18.0 | CR10148 | 2.4 | 1.0 | CR10243 | 17.1 | 1.8 |
| CR10059 | 66.4 | 14.4 | CR10149 | 9.1 | 1.4 | CR10244 | 22.3 | 3.5 |
| CR10060 | 76.6 | 10.2 | CR10150 | 13.6 | 3.9 | CR10245 | 55.1 | 11.0 |
| CR10061 | 63.1 | 5.9 | CR10151 | 3.1 | 1.0 | CR10246 | 45.6 | 5.9 |
| CR10062 | 60.6 | 18.6 | CR10152 | 9.6 | 2.8 | CR10247 | 31.2 | 4.7 |
| CR10063 | 47.0 | 15.2 | CR10153 | 4.7 | 0.5 | CR10248 | 31.4 | 9.3 |
| CR10064 | 46.0 | 21.0 | CR10154 | 2.4 | 0.3 | CR10249 | 25.9 | 1.0 |
| CR10065 | 51.0 | 11.0 | CR10155 | 3.6 | 0.6 | CR10250 | 27.1 | 4.4 |
| CR10066 | 48.0 | 10.5 | CR10156 | 4.9 | 0.9 | CR10251 | 24.2 | 3.8 |
| CR10067 | 45.9 | 14.7 | CR10157 | 3.5 | 1.0 | CR10252 | 15.2 | 1.5 |
| CR09753 | 48.7 | 15.0 | CR10158 | 7.1 | 0.9 | CR10253 | 14.3 | 2.1 |
| CR10068 | 39.0 | 13.6 | CR10159 | 2.5 | 0.1 | CR10254 | 17.8 | 2.4 |
| CR10069 | 57.3 | 17.3 | CR10160 | 6.8 | 1.3 | CR10255 | 21.2 | 5.3 |
| CR10070 | 62.0 | 13.3 | CR10161 | 3.5 | 0.7 | CR10256 | 28.2 | 24.3 |
| CR10071 | 42.7 | 7.8 | CR10162 | 5.9 | 1.4 | CR10257 | 58.6 | 4.0 |
| CR10072 | 54.0 | 19.1 | CR10163 | 3.3 | 0.8 | CR10258 | 35.9 | 5.0 |
| CR10073 | 45.1 | 18.8 | CR10164 | 1.4 | 0.2 | CR10259 | 6.8 | 1.1 |
| CR10074 | 56.0 | 17.1 | CR10165 | 4.1 | 0.9 | CR10260 | 23.7 | 0.9 |
| CR10075 | 60.8 | 19.1 | CR10166 | 4.5 | 0.7 | CR10261 | 21.4 | 1.8 |
| CR10076 | 14.0 | 5.9 | CR10167 | 0.9 | 0.3 | CR10262 | 11.8 | 1.9 |
| CR10077 | 50.5 | 14.1 | CR10168 | 6.4 | 0.8 | CR10263 | 15.6 | 2.0 |
| CR10078 | 47.0 | 10.3 | CR10169 | 4.0 | 0.8 | CR10264 | 10.2 | 2.2 |
| CR10079 | 54.9 | 14.3 | CR10170 | 4.6 | 0.5 | CR10265 | 18.9 | 3.6 |
| CR10080 | 71.8 | 12.2 | CR10171 | 10.5 | 2.3 | CR10266 | 62.0 | 2.1 |
| CR10081 | 67.8 | 12.0 | CR10172 | 14.0 | 3.9 | CR10267 | 61.7 | 2.0 |
| CR10082 | 26.4 | 7.1 | CR10173 | 3.5 | 0.8 | CR10268 | 21.6 | 1.9 |
| CR10083 | 51.3 | 26.1 | CR10174 | 3.9 | 0.6 | CR10269 | 26.2 | 2.5 |
| CR10084 | 43.4 | 13.4 | CR10175 | 4.3 | 1.0 | CR10270 | 18.1 | 3.9 |
| CR10085 | 53.9 | 24.9 | CR10176 | 7.9 | 1.0 | CR10271 | 30.7 | 0.5 |
| CR10086 | 40.6 | 18.3 | CR10177 | 2.2 | 0.2 | CR10272 | 6.7 | 1.0 |
| CR10087 | 45.4 | 15.9 | CR10178 | 4.9 | 1.2 | CR10273 | 32.3 | 5.6 |
| CR10088 | 45.2 | 16.7 | CR10179 | 4.1 | 0.7 | CR10274 | 14.3 | 2.9 |
| CR10089 | 51.0 | 18.7 | CR10180 | 4.5 | 1.0 | CR10275 | 15.4 | 5.7 |
| CR10090 | 60.3 | 16.7 | CR10181 | 3.8 | 1.0 | CR10276 | 27.2 | 1.2 |
| CR10091 | 60.0 | 18.9 | CR10182 | 4.4 | 1.8 | CR10277 | 45.2 | 3.9 |
| CR10092 | 52.9 | 45.7 | CR10183 | 13.9 | 2.5 | CR10278 | 66.3 | 5.3 |
| CR10093 | 50.0 | 14.6 | CR10184 | 7.3 | 0.7 | CR10279 | 23.2 | 3.3 |
| CR10094 | 60.4 | 15.5 | CR10185 | 3.9 | 0.4 | CR10280 | 31.3 | 4.4 |
| CR10095 | 29.0 | 12.4 | CR10186 | 2.6 | 0.3 | CR10281 | 21.9 | 3.7 |
| CR10096 | 51.0 | 20.1 | CR10187 | 11.6 | 3.7 | CR10282 | 22.3 | 0.6 |
| CR10097 | 41.1 | 14.6 | CR10188 | 4.7 | 0.3 | CR10283 | 28.7 | 2.9 |
| CR10098 | 35.6 | 30.7 | CR10189 | 2.3 | 0.1 | CR10284 | 9.1 | 3.8 |
| CR10099 | 47.7 | 14.1 | CR10190 | 2.6 | 0.6 | CR10285 | 14.9 | 2.7 |
| CR10100 | 30.6 | 26.9 | CR10191 | 3.9 | 1.1 | CR10286 | 18.4 | 3.4 |
| CR10101 | 44.5 | 38.9 | CR10192 | 4.4 | 0.9 | CR10287 | 19.8 | 2.7 |
| CR10102 | 56.1 | 48.5 | CR10193 | 15.1 | 7.1 | CR10288 | 71.5 | 4.8 |
| CR10103 | 55.0 | 20.0 | CR10194 | 9.8 | 0.3 | CR10289 | 41.1 | 4.2 |
| CR10104 | 53.6 | 23.1 | CR10195 | 2.0 | 0.9 | CR10290 | 13.4 | 2.2 |
| CR10105 | 41.9 | 18.3 | CR10196 | 1.8 | 0.2 | CR10291 | 15.1 | 2.6 |
| CR10106 | 52.4 | 16.5 | CR10197 | 5.1 | 2.0 | CR10292 | 21.9 | 6.0 |
| CR10107 | 33.6 | 11.2 | CR10198 | 2.2 | 0.9 | CR10293 | 16.4 | 5.6 |
| CR10108 | 61.6 | 13.7 | CR10199 | 14.0 | 3.7 | CR10294 | 35.1 | 7.9 |
| CR10109 | 50.5 | 12.9 | CR10200 | 4.5 | 2.4 | CR10295 | 34.1 | 2.8 |
| CR10110 | 40.7 | 11.5 | CR10201 | 1.0 | 0.5 | CR10296 | 11.3 | 3.5 |
| CR10111 | 59.6 | 18.7 | CR10202 | 5.2 | 0.9 | CR10297 | 22.6 | 1.2 |
| CR10112 | 13.8 | 11.5 | CR10203 | 12.4 | 2.2 | CR10298 | 58.5 | 5.2 |
| CR10113 | 82.2 | 7.0 | CR10204 | 28.6 | 8.2 | CR10299 | 70.8 | 10.4 |
| CR10114 | 36.2 | 5.7 | CR10205 | 3.4 | 1.0 | CR10300 | 50.2 | 14.2 |
| CR10115 | 77.2 | 7.1 | CR10206 | 13.6 | 1.4 | CR10301 | 63.4 | 10.9 |
| CR10116 | 38.6 | 4.4 | CR10207 | 1.6 | 0.3 | CR10302 | 24.5 | 12.4 |
| CR10117 | 73.1 | 6.8 | CR10208 | 12.3 | 2.5 | CR10303 | 49.2 | 11.6 |
| CR10118 | 76.0 | 3.3 | CR10209 | 15.9 | 2.9 | CR10304 | 58.7 | 13.6 |
| CR10119 | 78.5 | 3.6 | CR10210 | 9.7 | 1.5 | CR10305 | 43.5 | 10.0 |
| CR10120 | 72.6 | 6.7 | CR10211 | 6.2 | 1.3 | CR10306 | 31.5 | 10.0 |
| CR10121 | 71.6 | 9.8 | CR10212 | 10.7 | 0.6 | CR10307 | 57.9 | 16.1 |
| CR10122 | 77.2 | 5.8 | CR10213 | 21.1 | 6.1 | CR10308 | 55.7 | 5.6 |
| CR10123 | 50.3 | 11.7 | CR10214 | 5.7 | 2.2 | CR10309 | 74.5 | 4.3 |
| CR09734 | 66.6 | 7.6 | CR10215 | 9.5 | 1.7 | CR10310 | 56.6 | 4.1 |
| CR09723 | 62.5 | 14.2 | CR10216 | 6.0 | 1.2 | CR10311 | 55.1 | 6.0 |
| CR09726 | 46.1 | 17.4 | CR10217 | 2.8 | 0.9 | CR10312 | 13.3 | 3.2 |
| CR10124 | 23.5 | 12.2 | CR10218 | 1.2 | 0.1 | CR10313 | 21.8 | 2.2 |
| CR10125 | 49.8 | 9.5 | CR10219 | 5.0 | 0.8 | CR10314 | 32.0 | 5.6 |
| CR10126 | 46.8 | 8.4 | CR10220 | 4.2 | 0.9 | CR10315 | 18.6 | 0.6 |
| CR10127 | 42.8 | 13.7 | CR10221 | 4.1 | 0.5 | CR10316 | 11.3 | 0.9 |
| CR10128 | 37.2 | 19.3 | CR10222 | 2.1 | 0.6 | CR10317 | 12.1 | 3.9 |
| CR10129 | 49.9 | 13.5 | CR10223 | 7.3 | 0.7 | CR10318 | 26.4 | 5.2 |
| CR10600 | 64.9 | 4.7 | CR10691 | 15.2 | 2.4 | CR10785 | 75.2 | 3.6 |
| CR10601 | 33.1 | 4.2 | CR10692 | 1.4 | 0.3 | CR10786 | 48.5 | 7.7 |
| CR10602 | 2.0 | 0.2 | CR10693 | 0.9 | 0.2 | CR10787 | 29.1 | 3.6 |
| CR10603 | 45.4 | 2.9 | CR10694 | 10.6 | 0.6 | CR10788 | 65.6 | 6.9 |
| CR10604 | 49.9 | 3.4 | CR10695 | 9.7 | 0.8 | CR10789 | 62.7 | 1.3 |
| CR10605 | 42.0 | 3.4 | CR10696 | 4.2 | 0.4 | CR10790 | 58.9 | 4.2 |
| CR10606 | 57.7 | 4.7 | CR10697 | 6.5 | 0.4 | CR10791 | 71.4 | 3.6 |
| CR10607 | 66.0 | 2.2 | CR10698 | 8.8 | 1.8 | CR10792 | 64.4 | 8.2 |
| CR10608 | 72.2 | 5.1 | CR10699 | 15.0 | 2.9 | CR10793 | 61.8 | 2.2 |
| CR10609 | 50.7 | 4.1 | CR10700 | 12.2 | 0.7 | CR10794 | 71.9 | 5.3 |
| CR10610 | 75.2 | 3.6 | CR10701 | 15.0 | 2.9 | CR10795 | 75.3 | 6.8 |
| CR10611 | 2.6 | 0.5 | CR10702 | 0.3 | 0.1 | CR10796 | 2.9 | 1.1 |
| CR10612 | 25.8 | 8.3 | CR10703 | 12.2 | 1.9 | CR10797 | 44.7 | 7.7 |
| CR10613 | 30.8 | 9.2 | CR10704 | 8.7 | 1.3 | CR10798 | 30.8 | 5.1 |
| CR10614 | 28.9 | 4.8 | CR10705 | 5.1 | 0.5 | CR10799 | 28.0 | 4.1 |
| CR10615 | 25.0 | 4.3 | CR10706 | 5.7 | 0.5 | CR10800 | 22.2 | 2.2 |
| CR10616 | 28.5 | 7.6 | CR10707 | 8.7 | 2.5 | CR10801 | 27.8 | 4.9 |
| CR10617 | 24.7 | 3.1 | CR10708 | 8.6 | 0.8 | CR10802 | 26.9 | 5.0 |
| CR10618 | 0.6 | 0.1 | CR10709 | 0.8 | 0.2 | CR10803 | 6.2 | 0.5 |
| CR10619 | 39.1 | 4.5 | CR10710 | 13.3 | 1.9 | CR10804 | 27.8 | 4.2 |
| CR10620 | 56.3 | 4.2 | CR10711 | 15.1 | 3.9 | CR10805 | 55.1 | 9.8 |
| CR10621 | 3.4 | 0.4 | CR10712 | 0.4 | 0.1 | CR10806 | 1.7 | 0.4 |
| CR10622 | 8.4 | 1.4 | CR10713 | 1.2 | 0.2 | CR10807 | 10.8 | 2.3 |
| CR10623 | 19.9 | 3.8 | CR10714 | 3.2 | 0.8 | CR10808 | 12.0 | 1.9 |
| CR10624 | 22.4 | 1.6 | CR10715 | 9.2 | 2.6 | CR10809 | 20.3 | 5.2 |
| CR10625 | 24.9 | 1.1 | CR10716 | 8.8 | 1.1 | CR10810 | 26.6 | 4.1 |
| CR10626 | 11.5 | 1.1 | CR10717 | 1.1 | 0.3 | CR10811 | 11.9 | 2.6 |
| CR10627 | 19.1 | 1.5 | CR10718 | 7.5 | 2.3 | CR10812 | 34.8 | 4.4 |
| CR10628 | 25.9 | 4.8 | CR10719 | 7.1 | 1.3 | CR10813 | 15.6 | 3.2 |
| CR10629 | 23.2 | 3.3 | CR10720 | 9.3 | 2.1 | CR10814 | 17.7 | 2.4 |
| CR10630 | 34.8 | 3.2 | CR10721 | 10.2 | 5.3 | CR10815 | 29.3 | 6.6 |
| CR10631 | 6.1 | 4.9 | CR10722 | 0.2 | 0.1 | CR10816 | 1.4 | 0.2 |
| CR10632 | 3.0 | 0.4 | CR10723 | 1.2 | 0.2 | CR10817 | 18.5 | 3.5 |
| CR10633 | 25.3 | 4.4 | CR10724 | 9.5 | 1.9 | CR10818 | 33.6 | 5.9 |
| CR10634 | 1.0 | 0.0 | CR10725 | 0.3 | 0.1 | CR10819 | 1.3 | 0.1 |
| CR10635 | 34.4 | 2.7 | CR10726 | 11.5 | 3.3 | CR10820 | 17.0 | 2.3 |
| CR10636 | 11.6 | 1.4 | CR10727 | 1.0 | 0.2 | CR10821 | 8.8 | 1.1 |
| CR10637 | 0.4 | 0.1 | CR10728 | 0.9 | 0.1 | CR10822 | 4.8 | 0.4 |
| CR10638 | 21.9 | 4.6 | CR10729 | 7.4 | 3.2 | CR10823 | 27.5 | 5.1 |
| CR10639 | 22.1 | 5.6 | CR10730 | 3.1 | 0.9 | CR10824 | 12.9 | 1.1 |
| CR10640 | 30.0 | 2.0 | CR10731 | 7.9 | 2.0 | CR10825 | 29.4 | 6.7 |
| CR10641 | 54.1 | 1.9 | CR10732 | 14.0 | 5.5 | CR10826 | 38.4 | 2.5 |
| CR10642 | 34.3 | 3.0 | CR10733 | 1.7 | 0.3 | CR10827 | 41.0 | 3.8 |
| CR10643 | 1.3 | 0.4 | CR10734 | 0.8 | 0.2 | CR10828 | 8.7 | 2.4 |
| CR10644 | 19.5 | 3.9 | CR10735 | 8.2 | 1.7 | CR10829 | 16.7 | 3.0 |
| CR10645 | 22.8 | 1.5 | CR10736 | 16.5 | 6.2 | CR10830 | 18.9 | 6.4 |
| CR10646 | 29.2 | 3.2 | CR10737 | 9.9 | 0.9 | CR10831 | 30.6 | 1.7 |
| CR10647 | 1.0 | 0.1 | CR10738 | 0.3 | 0.1 | CR10832 | 1.2 | 0.3 |
| CR10648 | 20.6 | 6.6 | CR10739 | 6.7 | 0.8 | CR10833 | 21.2 | 5.7 |
| CR10649 | 19.3 | 2.5 | CR10740 | 4.9 | 0.8 | CR10834 | 28.2 | 4.6 |
| CR10650 | 22.2 | 3.1 | CR10741 | 6.2 | 0.7 | CR10835 | 20.2 | 0.3 |
| CR10651 | 29.8 | 5.7 | CR10742 | 6.0 | 1.7 | CR10836 | 12.0 | 2.4 |
| CR10652 | 1.9 | 0.2 | CR10743 | 0.3 | 0.1 | CR10837 | 1.7 | 0.2 |
| CR10653 | 2.3 | 0.4 | CR10744 | 0.3 | 0.1 | CR10838 | 3.0 | 1.1 |
| CR10654 | 25.8 | 3.6 | CR10745 | 11.8 | 5.7 | CR10839 | 17.5 | 3.1 |
| CR10655 | 23.8 | 3.4 | CR10746 | 8.5 | 2.0 | CR10840 | 17.0 | 0.6 |
| CR10656 | 0.8 | 0.4 | CR10747 | 0.5 | 0.2 | CR10841 | 4.6 | 1.0 |
| CR10657 | 18.0 | 4.6 | CR10748 | 1.4 | 0.4 | CR10842 | 10.8 | 3.1 |
| CR10658 | 21.8 | 1.9 | CR10749 | 8.5 | 1.3 | CR10843 | 14.6 | 1.9 |
| CR10659 | 1.0 | 0.1 | CR10750 | 0.2 | 0.1 | CR10844 | 0.4 | 0.0 |
| CR10660 | 26.8 | 1.6 | CR10751 | 8.4 | 2.9 | CR10845 | 19.5 | 2.9 |
| CR10661 | 20.9 | 0.6 | CR10752 | 6.7 | 2.3 | CR10846 | 19.2 | 2.4 |
| CR10662 | 34.2 | 1.4 | CR10753 | 5.6 | 3.8 | CR10847 | 15.9 | 1.0 |
| CR10663 | 54.8 | 2.7 | CR10754 | 35.2 | 23.3 | CR10848 | 38.7 | 2.6 |
| CR10664 | 46.8 | 4.0 | CR10755 | 9.5 | 3.8 | CR10849 | 28.8 | 4.0 |
| CR10665 | 0.3 | 0.2 | CR10756 | 0.2 | 0.1 | CR10850 | 0.3 | 0.1 |
| CR10666 | 0.9 | 0.2 | CR10757 | 0.5 | 0.1 | CR10851 | 4.7 | 1.6 |
| CR10667 | 40.8 | 6.0 | CR10758 | 9.4 | 1.7 | CR10852 | 34.4 | 8.8 |
| CR10668 | 0.7 | 0.3 | CR10759 | 0.5 | 0.1 | CR10853 | 4.8 | 1.6 |
| CR10669 | 32.0 | 9.7 | CR10760 | 1.9 | 0.6 | CR10854 | 23.6 | 6.3 |
| CR10670 | 37.8 | 13.5 | CR10761 | 10.2 | 1.9 | CR10855 | 21.5 | 7.3 |
| CR10671 | 1.3 | 0.4 | CR10762 | 0.2 | 0.0 | CR10856 | 0.6 | 0.2 |
| CR10672 | 38.2 | 2.8 | CR10763 | 7.8 | 2.6 | CR10857 | 20.8 | 2.6 |
| CR10673 | 7.2 | 1.1 | CR10764 | 0.3 | 0.1 | CR10858 | 1.4 | 0.5 |
| CR10674 | 81.0 | 2.3 | CR10765 | 29.6 | 7.0 | CR10859 | 59.8 | 8.9 |
| CR10675 | 2.1 | 0.3 | CR10766 | 1.2 | 0.5 | CR10860 | 6.9 | 3.3 |
| CR10676 | 41.3 | 7.7 | CR10767 | 2.0 | 0.4 | CR10861 | 22.1 | 10.2 |
| CR10677 | 0.2 | 0.1 | CR10768 | 0.2 | 0.1 | CR10862 | 0.4 | 0.2 |
| CR10678 | 26.2 | 2.7 | CR10769 | 2.7 | 0.7 | CR10863 | 31.4 | 10.7 |
| CR10679 | 71.1 | 3.1 | CR10770 | 26.4 | 8.9 | CR10864 | 61.6 | 13.5 |
| CR10680 | 57.8 | 7.9 | CR10771 | 8.7 | 4.7 | CR10865 | 60.2 | 10.0 |
| CR10681 | 3.6 | 0.6 | CR10772 | 0.3 | 0.1 | CR10866 | 1.4 | 0.4 |
| CR10682 | 69.4 | 1.6 | CR10773 | 32.8 | 12.4 | CR10867 | 47.8 | 6.2 |
| CR10683 | 33.4 | 10.7 | CR10774 | 1.2 | 0.5 | CR10868 | 29.6 | 6.6 |
| CR10684 | 5.1 | 1.8 | CR10775 | 2.0 | 1.4 | CR10869 | 20.1 | 7.3 |
| CR09687 | 38.3 | 3.2 | CR10776 | 3.2 | 0.6 | CR10870 | 37.3 | 2.2 |
| CR09676 | 67.8 | 6.9 | CR10777 | 17.2 | 7.9 | CR10871 | 56.7 | 4.5 |
| CR09679 | 25.0 | 4.3 | CR10778 | 7.6 | 2.6 | CR10872 | 18.1 | 2.3 |
| CR10685 | 0.4 | 0.3 | CR10779 | 0.5 | 0.1 | CR10873 | 6.9 | 1.0 |
| CR10686 | 24.3 | 3.8 | CR10780 | 6.4 | 0.8 | CR10874 | 24.1 | 5.0 |
| CR10687 | 34.6 | 3.5 | CR10781 | 10.6 | 3.4 | CR10875 | 20.0 | 3.7 |
| CR10688 | 27.1 | 3.4 | CR10782 | 4.0 | 1.1 | CR10876 | 7.3 | 0.5 |
| CR10689 | 0.3 | 0.0 | CR10783 | 0.2 | 0.1 | CR10877 | 0.5 | 0.2 |
| CR10690 | 11.9 | 2.4 | CR10784 | 0.4 | 0.1 | CR10878 | 6.3 | 1.4 |
| CR11158 | 79.4 | 4.1 | CR11252 | 11.9 | 1.3 | CR11346 | 89.0 | 2.5 |
| CR11159 | 74.6 | 1.2 | CR11253 | 18.6 | 1.7 | CR11347 | 77.9 | 5.0 |
| CR11160 | 63.3 | 4.1 | CR11254 | 9.2 | 0.5 | CR11348 | 69.2 | 3.3 |
| CR11161 | 58.6 | 2.6 | CR11255 | 4.9 | 0.6 | CR11349 | 69.9 | 6.0 |
| CR11162 | 67.8 | 2.3 | CR11256 | 18.5 | 0.9 | CR11350 | 73.4 | 2.6 |
| CR11163 | 53.4 | 7.1 | CR11257 | 2.5 | 0.6 | CR11351 | 72.1 | 5.5 |
| CR11164 | 63.6 | 2.2 | CR11258 | 12.4 | 2.8 | CR11352 | 70.4 | 1.7 |
| CR11165 | 65.2 | 2.2 | CR11259 | 5.2 | 0.9 | CR11353 | 66.9 | 2.7 |
| CR11166 | 52.6 | 5.2 | CR11260 | 5.9 | 1.0 | CR11354 | 61.6 | 3.5 |
| CR11167 | 68.3 | 3.6 | CR11261 | 18.9 | 1.6 | CR11355 | 67.1 | 3.7 |
| CR11168 | 67.8 | 1.5 | CR11262 | 4.0 | 0.6 | CR11356 | 82.6 | 1.5 |
| CR11169 | 59.5 | 9.5 | CR11263 | 8.4 | 4.9 | CR11357 | 68.2 | 4.8 |
| CR11170 | 60.1 | 16.5 | CR11264 | 10.4 | 4.2 | CR11358 | 49.5 | 0.9 |
| CR11171 | 61.5 | 18.2 | CR11265 | 7.3 | 1.6 | CR11359 | 43.4 | 4.8 |
| CR11172 | 30.0 | 11.7 | CR11266 | 1.6 | 0.1 | CR11360 | 37.7 | 5.0 |
| CR11173 | 44.7 | 19.6 | CR11267 | 1.6 | 0.3 | CR11361 | 33.9 | 1.3 |
| CR11174 | 56.0 | 15.1 | CR11268 | 8.5 | 0.8 | CR11362 | 37.5 | 6.1 |
| CR11175 | 35.8 | 1.6 | CR11269 | 0.8 | 0.2 | CR11363 | 41.0 | 7.2 |
| CR11176 | 32.0 | 8.9 | CR11270 | 1.3 | 0.2 | CR11364 | 30.7 | 1.8 |
| CR11177 | 61.8 | 10.4 | CR11271 | 9.3 | 2.3 | CR11365 | 49.5 | 3.7 |
| CR11178 | 71.5 | 6.7 | CR11272 | 12.1 | 2.1 | CR11366 | 65.8 | 1.1 |
| CR11179 | 73.9 | 16.4 | CR11273 | 34.8 | 33.7 | CR11367 | 66.8 | 2.9 |
| CR11180 | 64.3 | 12.3 | CR11274 | 9.0 | 7.6 | CR11368 | 46.5 | 7.1 |
| CR11181 | 48.0 | 6.8 | CR11275 | 4.2 | 0.3 | CR11369 | 35.9 | 6.1 |
| CR11182 | 35.3 | 5.6 | CR11276 | 3.2 | 0.2 | CR11370 | 32.5 | 11.9 |
| CR11183 | 41.4 | 17.1 | CR11277 | 2.7 | 1.1 | CR11371 | 31.1 | 10.2 |
| CR11184 | 51.4 | 17.7 | CR11278 | 3.6 | 0.8 | CR11372 | 22.8 | 4.1 |
| CR11185 | 44.4 | 8.5 | CR11279 | 5.6 | 2.0 | CR11373 | 29.5 | 8.8 |
| CR11186 | 46.5 | 11.0 | CR11280 | 3.9 | 0.9 | CR11374 | 27.1 | 8.0 |
| CR11187 | 24.8 | 13.7 | CR11281 | 0.6 | 0.1 | CR11375 | 27.2 | 2.7 |
| CR11188 | 66.4 | 5.4 | CR11282 | 9.3 | 2.7 | CR11376 | 30.6 | 2.6 |
| CR11189 | 55.0 | 3.7 | CR11283 | 4.3 | 0.6 | CR11377 | 49.5 | 7.9 |
| CR11190 | 61.5 | 18.4 | CR11284 | 6.4 | 1.5 | CR11378 | 51.7 | 6.9 |
| CR11191 | 55.0 | 11.2 | CR11285 | 25.5 | 16.2 | CR11379 | 24.3 | 8.1 |
| CR11192 | 38.0 | 11.0 | CR11286 | 2.2 | 1.1 | CR11380 | 15.1 | 2.8 |
| CR11193 | 53.4 | 8.0 | CR11287 | 10.3 | 4.8 | CR11381 | 33.0 | 12.9 |
| CR11194 | 20.6 | 1.2 | CR11288 | 1.0 | 0.2 | CR11382 | 15.6 | 5.5 |
| CR11195 | 39.2 | 7.3 | CR11289 | 1.8 | 0.8 | CR11383 | 17.9 | 5.4 |
| CR11196 | 59.4 | 15.0 | CR11290 | 6.2 | 0.6 | CR11384 | 29.1 | 11.8 |
| CR11197 | 29.4 | 5.1 | CR11291 | 1.4 | 0.1 | CR11385 | 25.7 | 8.8 |
| CR11198 | 35.2 | 8.1 | CR11292 | 1.5 | 0.4 | CR11386 | 26.5 | 2.8 |
| CR11199 | 72.5 | 6.7 | CR11293 | 11.5 | 2.6 | CR11387 | 49.8 | 10.4 |
| CR11200 | 64.5 | 9.7 | CR11294 | 15.4 | 2.5 | CR11388 | 55.4 | 2.0 |
| CR11201 | 45.5 | 38.7 | CR11295 | 3.3 | 0.2 | CR11389 | 30.1 | 10.1 |
| CR11202 | 37.8 | 20.4 | CR11296 | 2.6 | 1.2 | CR11390 | 18.3 | 2.7 |
| CR11203 | 19.3 | 4.5 | CR11297 | 1.6 | 0.5 | CR11391 | 20.6 | 3.8 |
| CR11204 | 61.3 | 22.2 | CR11298 | 4.5 | 0.7 | CR11392 | 17.7 | 3.4 |
| CR11205 | 58.5 | 20.1 | CR11299 | 10.5 | 2.7 | CR11393 | 32.5 | 3.7 |
| CR11206 | 40.2 | 4.2 | CR11300 | 9.2 | 5.1 | CR11394 | 21.5 | 2.7 |
| CR11207 | 28.5 | 27.5 | CR11301 | 0.8 | 0.3 | CR11395 | 8.5 | 1.7 |
| CR11208 | 39.9 | 9.6 | CR11302 | 6.7 | 2.6 | CR11396 | 22.4 | 3.0 |
| CR11209 | 43.8 | 8.4 | CR11303 | 3.1 | 0.4 | CR11397 | 19.8 | 3.1 |
| CR11210 | 58.5 | 8.6 | CR11304 | 9.4 | 3.0 | CR11398 | 37.2 | 5.2 |
| CR11211 | 61.1 | 8.1 | CR11305 | 3.3 | 1.7 | CR11399 | 44.5 | 6.1 |
| CR11212 | 16.5 | 2.4 | CR11306 | 6.9 | 9.2 | CR11400 | 20.3 | 3.4 |
| CR11213 | 35.8 | 6.5 | CR11307 | 7.3 | 2.6 | CR11401 | 16.7 | 5.2 |
| CR11214 | 42.2 | 11.5 | CR11308 | 5.8 | 2.7 | CR11402 | 25.7 | 5.4 |
| CR11215 | 29.7 | 9.3 | CR11309 | 2.3 | 0.8 | CR11403 | 11.7 | 1.2 |
| CR11216 | 25.9 | 5.1 | CR11310 | 7.2 | 4.5 | CR11404 | 17.4 | 5.7 |
| CR11217 | 16.0 | 4.6 | CR11311 | 0.9 | 0.4 | CR11405 | 13.4 | 3.7 |
| CR11218 | 32.2 | 15.3 | CR11312 | 2.4 | 1.0 | CR11406 | 10.8 | 4.1 |
| CR11219 | 25.4 | 11.6 | CR11313 | 3.6 | 2.2 | CR11407 | 13.4 | 6.3 |
| CR11220 | 41.7 | 17.9 | CR11314 | 6.7 | 2.0 | CR11408 | 23.4 | 3.9 |
| CR11221 | 30.3 | 10.1 | CR11315 | 3.0 | 1.0 | CR11409 | 22.3 | 5.0 |
| CR11222 | 45.3 | 26.9 | CR11316 | 2.9 | 0.9 | CR11410 | 22.9 | 9.8 |
| CR11223 | 17.7 | 2.8 | CR11317 | 1.2 | 0.3 | CR11411 | 15.1 | 4.9 |
| CR11224 | 29.2 | 1.9 | CR11318 | 1.5 | 0.2 | CR11412 | 12.7 | 3.5 |
| CR11225 | 17.1 | 1.1 | CR11319 | 1.5 | 0.1 | CR11413 | 8.0 | 2.3 |
| CR11226 | 25.2 | 4.1 | CR11320 | 1.5 | 0.6 | CR11414 | 6.6 | 1.9 |
| CR11227 | 22.3 | 2.0 | CR11321 | 1.7 | 0.0 | CR11415 | 10.2 | 4.3 |
| CR11228 | 21.8 | 3.4 | CR11322 | 1.5 | 0.8 | CR11416 | 7.5 | 3.5 |
| CR11229 | 11.4 | 0.8 | CR11323 | 1.1 | 0.3 | CR11417 | 3.8 | 1.2 |
| CR11230 | 28.5 | 5.8 | CR11324 | 0.2 | 0.1 | CR11418 | 9.5 | 2.9 |
| CR11231 | 52.6 | 1.7 | CR11325 | 5.0 | 2.5 | CR11419 | 16.9 | 2.0 |
| CR11232 | 58.5 | 5.3 | CR11326 | 13.3 | 5.5 | CR11420 | 34.3 | 8.3 |
| CR11233 | 51.3 | 8.3 | CR11327 | 11.0 | 3.6 | CR11421 | 22.5 | 6.4 |
| CR11234 | 48.1 | 4.1 | CR11328 | 5.4 | 2.0 | CR11422 | 20.6 | 6.0 |
| CR11235 | 40.5 | 19.6 | CR11329 | 3.6 | 3.3 | CR11423 | 20.8 | 6.8 |
| CR11236 | 47.1 | 13.6 | CR11330 | 2.7 | 1.4 | CR11424 | 17.8 | 4.9 |
| CR11237 | 47.0 | 8.3 | CR11331 | 4.9 | 1.8 | CR11425 | 22.9 | 7.1 |
| CR11238 | 39.0 | 15.6 | CR11332 | 3.6 | 2.4 | CR11426 | 13.9 | 4.1 |
| CR11239 | 56.7 | 11.8 | CR11333 | 5.4 | 1.4 | CR11427 | 14.7 | 3.3 |
| CR11240 | 52.2 | 18.7 | CR11334 | 10.8 | 8.6 | CR11428 | 13.5 | 2.9 |
| CR11241 | 64.9 | 15.8 | CR11335 | 10.8 | 8.6 | CR11429 | 17.1 | 3.4 |
| CR11242 | 74.6 | 19.2 | CR11336 | 10.8 | 8.6 | CR11430 | 16.1 | 4.4 |
| CR11243 | 33.7 | 1.5 | CR11337 | 0.9 | 0.1 | CR11431 | 19.2 | 1.2 |
| CR11244 | 48.2 | 6.2 | CR11338 | 30.1 | 25.1 | CR11432 | 58.3 | 7.1 |
| CR11245 | 32.6 | 8.0 | CR11339 | 2.8 | 1.2 | CR11433 | 22.8 | 8.7 |
| CR11246 | 54.2 | 11.1 | CR11340 | 4.0 | 1.1 | CR11434 | 37.1 | 5.5 |
| CR11247 | 39.4 | 11.5 | CR11341 | 4.4 | 2.0 | CR11435 | 24.2 | 2.4 |
| CR11248 | 41.0 | 1.9 | CR11342 | 7.1 | 0.3 | CR11436 | 24.0 | 5.8 |
| CR11249 | 69.4 | 21.0 | CR11343 | 3.7 | 1.3 | CR11437 | 15.9 | 5.7 |
| CR11250 | 17.9 | 9.4 | CR11344 | 1.0 | 0.4 | CR11438 | 11.7 | 3.1 |
| CR11251 | 20.7 | 4.7 | CR11345 | 1.6 | 0.5 | CR11439 | 14.9 | 4.2 |

| G494 Var | Edit | SD | G499 Var | Edit | SD | G502 Var | Edit | SD |
|---|---|---|---|---|---|---|---|---|
| CR10414 | 18.3 | 3.8 | CR10509 | 19.8 | 6.6 | CR09618 | 8.4 | 3.7 |
| CR03360 | 38.2 | 8.2 | CR05303 | 16.6 | 5.6 | CR00689 | 9.8 | 4.8 |
| CR10320 | 51.7 | 5.5 | CR10415 | 39.6 | 1.3 | CR10510 | 24.3 | 3.4 |
| CR10321 | 56.1 | 7.1 | CR10416 | 49.9 | 6.6 | CR10511 | 22.8 | 0.5 |
| CR10322 | 46.3 | 3.8 | CR10417 | 25.9 | 4.3 | CR10512 | 8.3 | 4.1 |
| CR10323 | 48.1 | 1.2 | CR10418 | 45.9 | 7.8 | CR10513 | 10.5 | 1.1 |
| CR10324 | 48.8 | 2.6 | CR10419 | 35.3 | 2.8 | CR10514 | 10.6 | 0.8 |
| CR10325 | 53.1 | 2.7 | CR10420 | 43.4 | 5.0 | CR10515 | 17.7 | 7.9 |
| CR10326 | 48.5 | 4.4 | CR10421 | 46.0 | 2.4 | CR10516 | 19.0 | 5.7 |
| CR10327 | 56.9 | 3.1 | CR10422 | 38.0 | 3.0 | CR10517 | 24.6 | 4.7 |
| CR10328 | 52.2 | 5.7 | CR10423 | 39.4 | 4.2 | CR10518 | 17.6 | 0.9 |
| CR10329 | 55.7 | 5.5 | CR10424 | 41.7 | 8.5 | CR10519 | 19.7 | 3.8 |
| CR10330 | 54.5 | 6.4 | CR10425 | 45.4 | 7.6 | CR10520 | 17.3 | 15.0 |
| CR10331 | 42.1 | 8.6 | CR10426 | 26.7 | 4.3 | CR10521 | 13.7 | 3.7 |
| CR10332 | 43.6 | 12.6 | CR10427 | 24.3 | 5.7 | CR10522 | 21.8 | 4.8 |
| CR10333 | 36.2 | 3.8 | CR10428 | 32.3 | 10.9 | CR10523 | 8.7 | 1.6 |
| CR10334 | 28.7 | 5.9 | CR10429 | 31.3 | 2.0 | CR10524 | 7.4 | 0.9 |
| CR10335 | 31.7 | 13.3 | CR10430 | 31.9 | 5.4 | CR10525 | 8.1 | 0.8 |
| CR10336 | 20.7 | 7.5 | CR10431 | 33.4 | 5.9 | CR10526 | 6.3 | 1.0 |
| CR10337 | 28.0 | 11.1 | CR10432 | 30.4 | 6.3 | CR10527 | 5.5 | 0.5 |
| CR10338 | 12.3 | 4.0 | CR10433 | 20.2 | 6.2 | CR10528 | 3.1 | 0.1 |
| CR10339 | 22.5 | 3.2 | CR10434 | 28.1 | 6.1 | CR10529 | 7.8 | 1.4 |
| CR10340 | 45.2 | 1.8 | CR10435 | 46.9 | 6.8 | CR10530 | 28.3 | 6.2 |
| CR10341 | 41.2 | 10.3 | CR10436 | 24.7 | 3.3 | CR10531 | 12.8 | 2.8 |
| CR10342 | 18.5 | 8.5 | CR10437 | 17.7 | 3.0 | CR10532 | 8.8 | 2.3 |
| CR10343 | 16.9 | 3.6 | CR10438 | 20.7 | 1.6 | CR10533 | 11.8 | 1.1 |
| CR10344 | 16.2 | 2.9 | CR10439 | 24.1 | 1.6 | CR10534 | 5.4 | 1.2 |
| CR10345 | 18.8 | 5.3 | CR10440 | 28.4 | 4.3 | CR10535 | 7.7 | 2.2 |
| CR10346 | 10.8 | 3.2 | CR10441 | 26.0 | 3.2 | CR10536 | 6.5 | 0.8 |
| CR10347 | 19.7 | 5.8 | CR10442 | 31.8 | 5.5 | CR10537 | 10.7 | 0.5 |
| CR10348 | 19.2 | 1.5 | CR10443 | 29.7 | 0.7 | CR09660 | 6.8 | 1.7 |
| CR10349 | 12.3 | 2.5 | CR10444 | 17.9 | 2.4 | CR10538 | 4.4 | 0.7 |
| CR10350 | 24.3 | 3.8 | CR10445 | 27.2 | 4.0 | CR10539 | 6.5 | 0.8 |
| CR10351 | 35.0 | 0.5 | CR10446 | 23.1 | 2.7 | CR10540 | 4.9 | 0.6 |
| CR10352 | 35.5 | 8.6 | CR10447 | 25.9 | 2.4 | CR10541 | 9.8 | 3.7 |
| CR10353 | 31.4 | 10.1 | CR10448 | 24.0 | 3.5 | CR10542 | 12.3 | 4.0 |
| CR10354 | 15.2 | 7.0 | CR10449 | 17.7 | 4.0 | CR10543 | 3.2 | 0.4 |
| CR10355 | 27.1 | 5.2 | CR10450 | 32.3 | 1.1 | CR10544 | 7.6 | 1.4 |
| CR10356 | 27.8 | 6.5 | CR10451 | 30.7 | 6.6 | CR10545 | 8.8 | 1.0 |
| CR10357 | 8.0 | 2.5 | CR10452 | 14.1 | 2.9 | CR10546 | 2.1 | 0.2 |
| CR10358 | 15.3 | 2.1 | CR10453 | 25.4 | 1.7 | CR10547 | 8.0 | 1.7 |
| CR10359 | 16.7 | 3.9 | CR10454 | 25.2 | 4.2 | CR10548 | 10.8 | 1.0 |
| CR10360 | 28.1 | 4.6 | CR10455 | 29.7 | 6.3 | CR10549 | 9.2 | 2.5 |
| CR10361 | 35.7 | 1.6 | CR10456 | 42.0 | 6.8 | CR10550 | 11.8 | 0.8 |
| CR10362 | 44.2 | 5.6 | CR10457 | 39.8 | 4.4 | CR10551 | 21.9 | 12.2 |
| CR10363 | 22.7 | 7.7 | CR10458 | 20.0 | 6.7 | CR10552 | 5.1 | 2.2 |
| CR10364 | 36.6 | 7.1 | CR10459 | 25.7 | 7.4 | CR10553 | 7.7 | 4.6 |
| CR10365 | 19.4 | 4.3 | CR10460 | 32.3 | 4.8 | CR10554 | 5.8 | 0.8 |
| CR10366 | 16.6 | 1.0 | CR10461 | 31.5 | 3.3 | CR10555 | 11.0 | 4.9 |
| CR10367 | 14.1 | 3.5 | CR10462 | 16.6 | 3.6 | CR10556 | 2.4 | 0.5 |
| CR10368 | 15.6 | 7.0 | CR10463 | 26.4 | 4.6 | CR10557 | 4.5 | 0.3 |
| CR10369 | 15.7 | 0.8 | CR10464 | 23.5 | 4.4 | CR10558 | 9.4 | 0.9 |
| CR10370 | 14.9 | 3.6 | CR10465 | 28.1 | 4.0 | CR10559 | 4.8 | 1.5 |
| CR10371 | 28.5 | 4.4 | CR10466 | 25.2 | 3.6 | CR10560 | 4.9 | 1.0 |
| CR10372 | 28.0 | 0.3 | CR10467 | 32.1 | 2.7 | CR10561 | 4.6 | 1.4 |
| CR10373 | 38.3 | 5.1 | CR10468 | 34.8 | 8.7 | CR10562 | 16.7 | 7.1 |
| CR10374 | 18.0 | 3.9 | CR10469 | 28.6 | 5.5 | CR10563 | 7.2 | 1.7 |
| CR10375 | 15.2 | 1.8 | CR10470 | 33.5 | 8.9 | CR10564 | 7.8 | 1.7 |
| CR10376 | 12.6 | 1.2 | CR10471 | 27.3 | 7.2 | CR10565 | 4.6 | 1.6 |
| CR10377 | 17.9 | 3.5 | CR10472 | 28.9 | 4.5 | CR10566 | 8.1 | 3.5 |
| CR10378 | 14.8 | 4.9 | CR10473 | 33.8 | 8.7 | CR10567 | 9.9 | 4.0 |
| CR10379 | 12.9 | 0.9 | CR10474 | 24.5 | 4.5 | CR10568 | 4.5 | 1.4 |
| CR10380 | 14.5 | 3.2 | CR10475 | 25.7 | 5.0 | CR10569 | 9.2 | 3.0 |
| CR10381 | 20.0 | 1.3 | CR10476 | 31.5 | 5.2 | CR10570 | 6.8 | 2.3 |
| CR10382 | 19.3 | 2.4 | CR10477 | 31.3 | 8.7 | CR10571 | 8.8 | 2.8 |
| CR10383 | 42.1 | 5.9 | CR10478 | 42.0 | 5.0 | CR10572 | 11.1 | 2.2 |
| CR10384 | 36.4 | 1.5 | CR10479 | 26.9 | 5.5 | CR10573 | 11.1 | 3.8 |
| CR10385 | 18.2 | 1.1 | CR10480 | 18.4 | 2.6 | CR10574 | 3.8 | 0.7 |
| CR10386 | 12.8 | 1.9 | CR10481 | 25.1 | 3.7 | CR10575 | 11.3 | 11.1 |
| CR10387 | 16.4 | 1.0 | CR10482 | 27.1 | 3.3 | CR10576 | 12.6 | 2.1 |
| CR10388 | 14.5 | 3.7 | CR10483 | 19.2 | 2.9 | CR10577 | 4.2 | 1.2 |
| CR10389 | 16.6 | 3.4 | CR10484 | 25.8 | 5.9 | CR10578 | 7.0 | 2.1 |
| CR10390 | 18.3 | 1.9 | CR10485 | 21.6 | 2.3 | CR10579 | 5.6 | 1.8 |
| CR10391 | 11.3 | 3.1 | CR10486 | 16.3 | 2.7 | CR10580 | 2.1 | 0.9 |
| CR10392 | 21.3 | 7.3 | CR10487 | 24.2 | 4.0 | CR10581 | 11.5 | 2.5 |
| CR10393 | 43.1 | 3.4 | CR10488 | 34.7 | 2.5 | CR10582 | 11.7 | 5.3 |
| CR10394 | 53.7 | 6.0 | CR10489 | 57.2 | 6.9 | CR10583 | 18.8 | 13.9 |
| CR10395 | 45.8 | 2.5 | CR10490 | 37.2 | 6.3 | CR10584 | 9.5 | 4.5 |
| CR10396 | 49.2 | 2.3 | CR10491 | 35.3 | 8.3 | CR10585 | 24.5 | 7.5 |
| CR10397 | 34.6 | 4.7 | CR10492 | 16.5 | 2.6 | CR10586 | 1.8 | 0.7 |
| CR10398 | 53.9 | 2.6 | CR10493 | 44.8 | 5.1 | CR10587 | 11.8 | 6.3 |
| CR10399 | 39.5 | 3.5 | CR10494 | 46.5 | 4.4 | CR10588 | 9.1 | 2.9 |
| CR10400 | 45.2 | 3.4 | CR10495 | 45.3 | 3.2 | CR10589 | 10.8 | 4.7 |
| CR10401 | 44.2 | 2.4 | CR10496 | 45.6 | 4.8 | CR10590 | 5.7 | 2.3 |
| CR10402 | 43.9 | 2.2 | CR10497 | 48.9 | 3.6 | CR10591 | 26.9 | 10.4 |
| CR10403 | 33.4 | 1.4 | CR10498 | 44.9 | 3.5 | CR10592 | 18.4 | 6.0 |
| CR10404 | 35.5 | 3.4 | CR10499 | 41.1 | 2.4 | CR10593 | 9.3 | 7.9 |
| CR10405 | 55.5 | 3.4 | CR10500 | 34.5 | 6.2 | CR09641 | 13.2 | 1.7 |
| CR10406 | 43.2 | 2.1 | CR10501 | 31.6 | 2.6 | CR09630 | 14.3 | 6.7 |
| CR10407 | 24.0 | 8.6 | CR10502 | 23.7 | 3.1 | CR09633 | 7.4 | 1.6 |
| CR10408 | 21.1 | 5.2 | CR10503 | 21.3 | 4.1 | CR10594 | 5.5 | 3.3 |
| CR10409 | 38.8 | 8.0 | CR10504 | 20.6 | 2.1 | CR10595 | 7.0 | 1.5 |
| CR10410 | 17.7 | 4.8 | CR10505 | 27.6 | 1.5 | CR10596 | 6.0 | 0.9 |
| CR10411 | 20.1 | 6.8 | CR10506 | 14.7 | 3.9 | CR10597 | 4.6 | 0.2 |
| CR10412 | 19.1 | 4.2 | CR10507 | 20.9 | 1.0 | CR10598 | 2.2 | 0.4 |
| CR10413 | 18.0 | 4.5 | CR10508 | 15.6 | 4.2 | CR10599 | 5.4 | 1.8 |
| CR10879 | 39.8 | 4.8 | CR10973 | 26.3 | 6.4 | CR11067 | 10.9 | 3.0 |
| CR10880 | 12.1 | 2.7 | CR10974 | 14.2 | 7.3 | CR11068 | 3.0 | 1.0 |
| CR10881 | 5.7 | 0.2 | CR10975 | 4.8 | 0.5 | CR11069 | 0.5 | 0.1 |
| CR10882 | 42.4 | 12.3 | CR10976 | 27.5 | 4.1 | CR11070 | 8.8 | 3.5 |
| CR10883 | 38.9 | 8.2 | CR10977 | 29.1 | 9.8 | CR11071 | 9.8 | 0.8 |
| CR10884 | 50.8 | 11.5 | CR10978 | 26.1 | 11.7 | CR11072 | 7.8 | 2.5 |
| CR10885 | 44.9 | 9.2 | CR10979 | 24.6 | 2.3 | CR11073 | 14.2 | 4.2 |
| CR10886 | 45.5 | 8.8 | CR10980 | 31.5 | 3.4 | CR11074 | 14.7 | 5.4 |
| CR10887 | 34.8 | 8.0 | CR10981 | 33.3 | 2.6 | CR11075 | 15.6 | 3.7 |
| CR10888 | 44.4 | 9.7 | CR10982 | 40.0 | 10.8 | CR11076 | 14.8 | 7.1 |
| CR10889 | 49.4 | 13.9 | CR10983 | 41.7 | 5.9 | CR11077 | 14.6 | 0.7 |
| CR10890 | 3.9 | 1.6 | CR10984 | 8.3 | 9.8 | CR11078 | 0.3 | 0.2 |
| CR10891 | 27.4 | 12.8 | CR10985 | 18.4 | 1.7 | CR11079 | 11.8 | 1.2 |
| CR10892 | 19.3 | 3.2 | CR10986 | 11.3 | 3.8 | CR11080 | 7.2 | 1.3 |
| CR10893 | 26.5 | 5.3 | CR10987 | 12.5 | 3.6 | CR11081 | 4.7 | 0.9 |
| CR10894 | 25.6 | 3.0 | CR10988 | 13.8 | 4.9 | CR11082 | 4.9 | 0.9 |
| CR10895 | 28.3 | 4.3 | CR10989 | 21.9 | 9.4 | CR11083 | 10.3 | 3.3 |
| CR10896 | 27.2 | 10.0 | CR10990 | 16.9 | 3.3 | CR11084 | 4.9 | 0.6 |
| CR10897 | 4.5 | 2.4 | CR10991 | 2.8 | 0.5 | CR11085 | 0.3 | 0.1 |
| CR10898 | 24.3 | 5.1 | CR10992 | 19.1 | 1.4 | CR11086 | 6.8 | 0.2 |
| CR10899 | 25.4 | 6.5 | CR10993 | 36.9 | 4.3 | CR11087 | 11.6 | 0.9 |
| CR10900 | 4.1 | 0.4 | CR10994 | 4.4 | 4.3 | CR11088 | 0.1 | 0.0 |
| CR10901 | 6.8 | 2.0 | CR10995 | 8.0 | 7.0 | CR11089 | 1.5 | 0.4 |
| CR10902 | 17.7 | 4.0 | CR10996 | 11.8 | 8.4 | CR11090 | 5.1 | 0.8 |
| CR10903 | 15.8 | 5.9 | CR10997 | 11.5 | 1.9 | CR11091 | 3.9 | 0.6 |
| CR10904 | 22.8 | 1.1 | CR10998 | 14.7 | 5.3 | CR11092 | 5.1 | 1.1 |
| CR10905 | 5.2 | 1.6 | CR10999 | 2.6 | 0.9 | CR11093 | 1.1 | 0.6 |
| CR10906 | 14.8 | 0.9 | CR11000 | 17.3 | 4.6 | CR11094 | 5.1 | 3.6 |
| CR10907 | 27.3 | 6.9 | CR11001 | 20.2 | 6.4 | CR11095 | 7.7 | 5.5 |
| CR10908 | 14.5 | 5.2 | CR11002 | 13.4 | 4.3 | CR11096 | 11.3 | 4.6 |
| CR10909 | 19.7 | 2.8 | CR11003 | 23.4 | 2.3 | CR11097 | 10.5 | 4.3 |
| CR10910 | 1.8 | 0.3 | CR11004 | 0.9 | 0.2 | CR11098 | 0.3 | 0.1 |
| CR10911 | 5.7 | 0.6 | CR11005 | 7.1 | 0.2 | CR11099 | 0.6 | 0.3 |
| CR10912 | 15.1 | 2.1 | CR11006 | 19.6 | 3.5 | CR11100 | 11.3 | 1.0 |
| CR10913 | 2.3 | 0.9 | CR11007 | 0.7 | 0.2 | CR11101 | 0.3 | 0.1 |
| CR10914 | 24.4 | 5.5 | CR11008 | 14.7 | 6.3 | CR11102 | 7.6 | 1.3 |
| CR10915 | 6.6 | 2.2 | CR11009 | 2.5 | 0.6 | CR11103 | 1.0 | 0.3 |
| CR10916 | 4.0 | 1.6 | CR11010 | 1.6 | 0.4 | CR11104 | 0.4 | 0.1 |
| CR10917 | 18.2 | 4.0 | CR11011 | 21.7 | 6.5 | CR11105 | 3.8 | 0.8 |
| CR10918 | 25.3 | 0.7 | CR11012 | 12.8 | 2.6 | CR11106 | 2.0 | 0.7 |
| CR10919 | 18.9 | 5.9 | CR11013 | 12.9 | 1.5 | CR11107 | 3.9 | 0.3 |
| CR10920 | 22.0 | 4.1 | CR11014 | 19.8 | 1.8 | CR11108 | 11.3 | 1.2 |
| CR10921 | 16.3 | 3.6 | CR11015 | 9.3 | 2.4 | CR11109 | 6.2 | 1.5 |
| CR10922 | 2.8 | 0.6 | CR11016 | 2.6 | 0.9 | CR11110 | 0.7 | 0.1 |
| CR10923 | 24.7 | 3.5 | CR11017 | 12.7 | 1.7 | CR11111 | 7.8 | 1.3 |
| CR10924 | 23.8 | 5.1 | CR11018 | 10.9 | 3.8 | CR11112 | 6.7 | 2.5 |
| CR10925 | 16.6 | 5.1 | CR11019 | 16.0 | 4.0 | CR11113 | 13.2 | 3.3 |
| CR10926 | 2.2 | 0.2 | CR11020 | 0.8 | 0.1 | CR11114 | 0.2 | 0.1 |
| CR10927 | 17.2 | 5.4 | CR11021 | 6.4 | 0.8 | CR11115 | 5.5 | 0.9 |
| CR10928 | 18.7 | 5.7 | CR11022 | 17.3 | 4.1 | CR11116 | 4.1 | 0.8 |
| CR10929 | 20.5 | 3.7 | CR11023 | 22.6 | 7.3 | CR11117 | 2.1 | 0.3 |
| CR10930 | 22.1 | 1.8 | CR11024 | 12.1 | 4.8 | CR11118 | 4.8 | 1.1 |
| CR10931 | 3.4 | 0.9 | CR11025 | 1.1 | 0.6 | CR11119 | 0.1 | 0.1 |
| CR10932 | 1.3 | 0.2 | CR11026 | 1.2 | 0.4 | CR11120 | 0.2 | 0.0 |
| CR10933 | 18.0 | 2.8 | CR11027 | 11.2 | 3.0 | CR11121 | 3.9 | 0.8 |
| CR10934 | 10.8 | 0.6 | CR11028 | 8.7 | 3.2 | CR11122 | 3.4 | 0.3 |
| CR10935 | 1.4 | 0.2 | CR11029 | 1.5 | 0.3 | CR11123 | 0.2 | 0.1 |
| CR10936 | 2.9 | 0.5 | CR11030 | 2.2 | 0.5 | CR11124 | 2.2 | 0.2 |
| CR10937 | 13.9 | 0.9 | CR11031 | 18.5 | 6.7 | CR11125 | 5.8 | 0.9 |
| CR10938 | 1.5 | 0.3 | CR11032 | 0.7 | 0.1 | CR11126 | 0.1 | 0.1 |
| CR10939 | 20.1 | 0.7 | CR11033 | 13.2 | 2.4 | CR11127 | 3.8 | 0.8 |
| CR10940 | 14.8 | 3.3 | CR11034 | 12.8 | 3.3 | CR11128 | 5.6 | 0.8 |
| CR10941 | 18.9 | 5.8 | CR11035 | 20.6 | 0.6 | CR11129 | 7.3 | 1.3 |
| CR10942 | 22.2 | 0.5 | CR11036 | 24.9 | 4.5 | CR11130 | 21.2 | 8.2 |
| CR10943 | 22.5 | 4.2 | CR11037 | 19.3 | 4.1 | CR11131 | 9.2 | 3.7 |
| CR10944 | 1.0 | 0.2 | CR11038 | 0.5 | 0.2 | CR11132 | 0.1 | 0.1 |
| CR10945 | 1.6 | 0.6 | CR11039 | 1.0 | 0.5 | CR11133 | 0.3 | 0.1 |
| CR10946 | 16.7 | 0.8 | CR11040 | 19.4 | 0.2 | CR11134 | 7.0 | 1.6 |
| CR10947 | 2.5 | 0.8 | CR11041 | 1.5 | 0.4 | CR11135 | 0.4 | 0.1 |
| CR10948 | 11.6 | 2.6 | CR11042 | 5.0 | 0.7 | CR11136 | 5.8 | 1.5 |
| CR10949 | 15.1 | 3.3 | CR11043 | 20.4 | 3.1 | CR11137 | 5.5 | 1.2 |
| CR10950 | 2.1 | 0.4 | CR11044 | 0.8 | 0.3 | CR11138 | 0.1 | 0.1 |
| CR10951 | 15.3 | 3.1 | CR11045 | 12.2 | 4.3 | CR11139 | 5.8 | 0.7 |
| CR10952 | 1.1 | 0.2 | CR11046 | 1.5 | 0.2 | CR11140 | 0.2 | 0.1 |
| CR10953 | 42.1 | 3.7 | CR11047 | 35.8 | 8.0 | CR11141 | 11.8 | 3.3 |
| CR10954 | 3.6 | 1.0 | CR11048 | 3.2 | 0.3 | CR11142 | 0.4 | 0.1 |
| CR10955 | 5.0 | 2.1 | CR11049 | 3.6 | 1.5 | CR11143 | 5.3 | 2.1 |
| CR10956 | 1.0 | 0.3 | CR11050 | 0.6 | 0.2 | CR11144 | 0.1 | 0.0 |
| CR10957 | 16.2 | 5.9 | CR11051 | 6.0 | 1.0 | CR11145 | 4.3 | 4.0 |
| CR10958 | 33.3 | 6.7 | CR11052 | 23.5 | 3.4 | CR11146 | 15.3 | 2.2 |
| CR10959 | 38.1 | 9.3 | CR11053 | 24.4 | 7.9 | CR11147 | 7.3 | 2.2 |
| CR10960 | 2.1 | 0.8 | CR11054 | 0.5 | 0.1 | CR11148 | 0.2 | 0.1 |
| CR10961 | 17.7 | 4.7 | CR11055 | 35.3 | 7.6 | CR11149 | 32.5 | 6.9 |
| CR10962 | 8.5 | 3.9 | CR11056 | 7.4 | 1.4 | CR11150 | 1.5 | 0.4 |
| CR10963 | 3.2 | 0.9 | CR11057 | 3.1 | 1.2 | CR11151 | 0.7 | 0.2 |
| CR10964 | 45.6 | 11.5 | CR11058 | 26.3 | 2.9 | CR09583 | 13.7 | 5.0 |
| CR10965 | 39.2 | 18.0 | CR11059 | 15.6 | 0.6 | CR09586 | 3.7 | 0.7 |
| CR10966 | 21.3 | 8.8 | CR11060 | 8.0 | 1.5 | CR09594 | 5.6 | 2.9 |
| CR10967 | 2.5 | 0.4 | CR11061 | 1.6 | 0.3 | CR11152 | 0.1 | 0.1 |
| CR10968 | 17.2 | 5.8 | CR11062 | 13.6 | 8.0 | CR11153 | 7.4 | 1.1 |
| CR10969 | 17.3 | 3.9 | CR11063 | 13.0 | 2.0 | CR11154 | 5.2 | 1.0 |
| CR10970 | 16.0 | 5.2 | CR11064 | 9.1 | 2.7 | CR11155 | 2.2 | 0.3 |
| CR10971 | 2.1 | 0.2 | CR11065 | 0.7 | 0.1 | CR11156 | 0.1 | 0.1 |
| CR10972 | 3.4 | 0.3 | CR11066 | 2.5 | 0.7 | CR11157 | 0.6 | 0.1 |
| CR11440 | 38.4 | 9.5 | CR11534 | 59.1 | 7.6 | CR11628 | 16.4 | 0.9 |
| CR11441 | 20.6 | 5.0 | CR11535 | 32.2 | 5.4 | CR11629 | 11.1 | 0.9 |
| CR11442 | 27.2 | 3.7 | CR11536 | 26.8 | 1.9 | CR11630 | 18.6 | 0.8 |
| CR11443 | 16.5 | 5.0 | CR11537 | 16.8 | 6.0 | CR11631 | 3.7 | 1.3 |
| CR11444 | 23.9 | 2.2 | CR11538 | 33.6 | 14.8 | CR11632 | 10.2 | 1.8 |
| CR11445 | 13.8 | 3.4 | CR11539 | 25.0 | 3.5 | CR11633 | 6.7 | 2.2 |
| CR11446 | 31.4 | 0.8 | CR11540 | 29.4 | 6.0 | CR11634 | 11.0 | 1.4 |
| CR11447 | 25.2 | 1.6 | CR11541 | 23.4 | 1.5 | CR11635 | 8.5 | 1.2 |
| CR11448 | 18.1 | 4.7 | CR11542 | 18.0 | 2.3 | CR11636 | 5.6 | 0.4 |
| CR11449 | 12.6 | 4.6 | CR11543 | 27.9 | 0.9 | CR11637 | 13.7 | 2.3 |
| CR11450 | 23.0 | 3.5 | CR11544 | 30.4 | 2.0 | CR11638 | 12.0 | 1.5 |
| CR11451 | 21.4 | 2.8 | CR11545 | 22.7 | 6.9 | CR11639 | 20.6 | 7.8 |
| CR11452 | 18.7 | 1.5 | CR11546 | 38.6 | 19.0 | CR11640 | 9.4 | 3.8 |
| CR11453 | 11.8 | 2.7 | CR11547 | 25.5 | 12.8 | CR11641 | 4.4 | 0.6 |
| CR11454 | 11.5 | 5.4 | CR11548 | 11.2 | 3.0 | CR11642 | 5.1 | 1.5 |
| CR11455 | 12.1 | 3.5 | CR11549 | 15.2 | 9.9 | CR11643 | 2.3 | 0.7 |
| CR11456 | 17.0 | 0.4 | CR11550 | 11.9 | 8.4 | CR11644 | 9.0 | 2.5 |
| CR11457 | 6.4 | 0.3 | CR11551 | 6.9 | 1.2 | CR11645 | 1.4 | 0.6 |
| CR11458 | 4.8 | 0.2 | CR11552 | 7.0 | 3.6 | CR11646 | 1.4 | 0.5 |
| CR11459 | 9.8 | 0.7 | CR11553 | 12.2 | 3.1 | CR11647 | 10.3 | 1.8 |
| CR11460 | 12.3 | 2.0 | CR11554 | 14.4 | 4.9 | CR11648 | 7.2 | 1.8 |
| CR11461 | 13.0 | 1.8 | CR11555 | 25.5 | 4.7 | CR11649 | 13.6 | 3.5 |
| CR11462 | 14.3 | 2.0 | CR11556 | 14.6 | 5.9 | CR11650 | 6.3 | 0.9 |
| CR11463 | 11.4 | 1.1 | CR11557 | 6.1 | 1.1 | CR11651 | 3.5 | 0.4 |
| CR11464 | 8.7 | 1.4 | CR11558 | 8.5 | 4.4 | CR11652 | 4.7 | 1.6 |
| CR11465 | 5.1 | 0.6 | CR11559 | 5.0 | 0.9 | CR11653 | 1.3 | 0.2 |
| CR11466 | 8.0 | 2.3 | CR11560 | 8.6 | 2.9 | CR11654 | 2.7 | 0.7 |
| CR11467 | 9.2 | 1.4 | CR11561 | 14.4 | 7.7 | CR11655 | 3.0 | 0.9 |
| CR11468 | 12.0 | 0.3 | CR11562 | 5.6 | 1.1 | CR11656 | 2.3 | 0.6 |
| CR11469 | 6.8 | 1.6 | CR11563 | 6.0 | 4.4 | CR11657 | 1.1 | 0.3 |
| CR11470 | 5.1 | 0.1 | CR11564 | 9.7 | 5.2 | CR11658 | 8.0 | 2.5 |
| CR11471 | 11.5 | 3.5 | CR11565 | 6.9 | 2.0 | CR11659 | 4.5 | 1.7 |
| CR11472 | 16.9 | 6.4 | CR11566 | 12.7 | 3.9 | CR11660 | 2.0 | 0.5 |
| CR11473 | 5.7 | 0.3 | CR11567 | 11.5 | 12.4 | CR11661 | 2.7 | 0.7 |
| CR11474 | 8.0 | 2.1 | CR11568 | 4.2 | 1.8 | CR11662 | 2.8 | 0.5 |
| CR11475 | 5.2 | 1.1 | CR11569 | 9.4 | 3.2 | CR11663 | 1.8 | 0.7 |
| CR11476 | 3.8 | 0.4 | CR11570 | 2.5 | 0.4 | CR11664 | 1.1 | 0.3 |
| CR11477 | 5.4 | 0.6 | CR11571 | 3.6 | 2.0 | CR11665 | 1.2 | 0.4 |
| CR11478 | 4.8 | 0.0 | CR11572 | 10.0 | 4.0 | CR11666 | 3.3 | 0.4 |
| CR11479 | 5.7 | 0.1 | CR11573 | 2.3 | 1.0 | CR11667 | 0.6 | 0.1 |
| CR11480 | 7.1 | 0.8 | CR11574 | 3.2 | 1.4 | CR11668 | 2.2 | 0.5 |
| CR11481 | 7.3 | 0.1 | CR11575 | 12.0 | 2.4 | CR11669 | 7.0 | 1.8 |
| CR11482 | 13.2 | 1.3 | CR11576 | 4.7 | 1.4 | CR11670 | 2.6 | 0.4 |
| CR11483 | 5.5 | 0.2 | CR11577 | 6.9 | 4.0 | CR11671 | 1.3 | 0.5 |
| CR11484 | 4.4 | 1.1 | CR11578 | 4.3 | 2.4 | CR11672 | 1.1 | 0.3 |
| CR11485 | 2.4 | 0.3 | CR11579 | 3.1 | 0.7 | CR11673 | 2.3 | 0.5 |
| CR11486 | 4.2 | 0.1 | CR11580 | 5.7 | 1.5 | CR11674 | 1.1 | 0.3 |
| CR11487 | 8.8 | 0.6 | CR11581 | 10.4 | 3.3 | CR11675 | 2.3 | 0.6 |
| CR11488 | 6.3 | 1.7 | CR11582 | 5.3 | 2.9 | CR11676 | 2.1 | 0.7 |
| CR11489 | 1.8 | 0.1 | CR11583 | 1.4 | 0.3 | CR11677 | 0.5 | 0.1 |
| CR11490 | 4.4 | 0.1 | CR11584 | 4.3 | 0.9 | CR11678 | 3.1 | 0.5 |
| CR11491 | 6.9 | 1.8 | CR11585 | 4.7 | 2.1 | CR11679 | 2.1 | 0.4 |
| CR11492 | 6.3 | 0.3 | CR11586 | 11.7 | 2.5 | CR11680 | 8.5 | 2.8 |
| CR11493 | 10.5 | 2.5 | CR11587 | 18.6 | 19.7 | CR11681 | 3.0 | 0.7 |
| CR11494 | 2.5 | 0.4 | CR11588 | 4.2 | 1.3 | CR11682 | 1.0 | 0.4 |
| CR11495 | 3.4 | 0.4 | CR11589 | 4.3 | 1.0 | CR11683 | 1.4 | 0.1 |
| CR11496 | 4.8 | 0.3 | CR11590 | 7.0 | 1.7 | CR11684 | 1.7 | 0.2 |
| CR11497 | 2.6 | 0.7 | CR11591 | 2.5 | 1.0 | CR11685 | 1.2 | 0.1 |
| CR11498 | 3.7 | 0.6 | CR11592 | 4.6 | 1.0 | CR11686 | 1.5 | 0.4 |
| CR11499 | 2.3 | 0.1 | CR11593 | 1.1 | 0.3 | CR11687 | 0.3 | 0.1 |
| CR11500 | 6.6 | 0.5 | CR11594 | 2.6 | 0.1 | CR11688 | 1.3 | 0.3 |
| CR11501 | 3.3 | 0.0 | CR11595 | 2.0 | 0.9 | CR11689 | 0.8 | 0.1 |
| CR11502 | 5.6 | 1.1 | CR11596 | 4.7 | 1.1 | CR11690 | 5.1 | 3.3 |
| CR11503 | 4.2 | 0.2 | CR11597 | 4.2 | 0.8 | CR11691 | 1.1 | 0.1 |
| CR11504 | 2.9 | 0.1 | CR11598 | 4.0 | 1.9 | CR11692 | 1.0 | 0.3 |
| CR11505 | 3.1 | 0.4 | CR11599 | 1.3 | 0.1 | CR11693 | 0.3 | 0.1 |
| CR11506 | 2.4 | 0.2 | CR11600 | 1.7 | 0.2 | CR11694 | 0.7 | 0.1 |
| CR11507 | 3.8 | 0.8 | CR11601 | 3.5 | 1.2 | CR11695 | 0.7 | 0.2 |
| CR11508 | 2.3 | 0.4 | CR11602 | 1.9 | 0.3 | CR11696 | 0.7 | 0.3 |
| CR11509 | 2.6 | 0.0 | CR11603 | 2.0 | 0.4 | CR11697 | 0.9 | 0.2 |
| CR11510 | 1.7 | 0.6 | CR11604 | 1.2 | 0.2 | CR11698 | 0.7 | 0.2 |
| CR11511 | 3.1 | 0.1 | CR11605 | 1.8 | 0.5 | CR11699 | 0.6 | 0.1 |
| CR11512 | 3.1 | 0.8 | CR11606 | 1.7 | 0.3 | CR11700 | 1.1 | 0.4 |
| CR11513 | 4.1 | 0.6 | CR11607 | 1.7 | 0.3 | CR11701 | 5.7 | 4.6 |
| CR11514 | 3.8 | 0.2 | CR11608 | 6.1 | 1.0 | CR11702 | 1.7 | 0.8 |
| CR11515 | 3.7 | 0.7 | CR11609 | 2.9 | 0.7 | CR11703 | 3.3 | 0.2 |
| CR11516 | 4.8 | 0.5 | CR11610 | 14.3 | 19.7 | CR11704 | 1.5 | 0.4 |
| CR11517 | 7.8 | 4.5 | CR11611 | 2.6 | 2.7 | CR11705 | 1.3 | 0.2 |
| CR11518 | 5.1 | 0.1 | CR11612 | 2.3 | 0.6 | CR11706 | 1.2 | 0.2 |
| CR11519 | 5.9 | 0.3 | CR11613 | 2.5 | 0.6 | CR11707 | 1.6 | 0.4 |
| CR11520 | 2.9 | 0.3 | CR11614 | 5.0 | 5.8 | CR11708 | 1.2 | 0.5 |
| CR11521 | 3.5 | 0.1 | CR11615 | 2.2 | 0.5 | CR11709 | 3.7 | 1.7 |
| CR11522 | 3.6 | 0.5 | CR11616 | 2.7 | 1.4 | CR11710 | 2.8 | 1.4 |
| CR11523 | 4.5 | 0.1 | CR11617 | 12.0 | 15.0 | CR11711 | 3.0 | 1.2 |
| CR11524 | 4.2 | 1.4 | CR11618 | 3.5 | 0.1 | CR11712 | 3.2 | 0.8 |
| CR11525 | 2.1 | 0.3 | CR11619 | 3.9 | 2.2 | CR11713 | 1.4 | 0.3 |
| CR11526 | 22.3 | 2.8 | CR11620 | 15.9 | 8.9 | CR11714 | 3.1 | 0.2 |
| CR11527 | 13.7 | 1.1 | CR11621 | 6.2 | 4.3 | CR11715 | 1.7 | 0.3 |
| CR11528 | 15.4 | 0.4 | CR11622 | 11.7 | 7.2 | CR11716 | 2.4 | 0.6 |
| CR11529 | 12.1 | 1.1 | CR11623 | 9.0 | 7.8 | CR11717 | 4.3 | 2.0 |
| CR11530 | 5.2 | 0.9 | CR11624 | 6.6 | 1.4 | CR11718 | 2.9 | 0.8 |
| CR11531 | 7.7 | 0.2 | CR11625 | 4.8 | 1.7 | CR11719 | 1.7 | 0.6 |
| CR11532 | 5.7 | 0.4 | CR11626 | 2.5 | 0.5 | CR11720 | 0.5 | 0.1 |
| CR11533 | 6.5 | 0.9 | CR11627 | 3.7 | 1.5 | CR11721 | 1.2 | 0.2 |

### Example 4

[1778] The impacts of chemical modification type and position within the guide domain were evaluated in an editing screen of modified sgRNAs. The screen assayed guides modified with 2′F, 2′OMe and PS. The complete pattern set was applied to the nucleobase sequence of three guides. Test modification patterns in this example were applied to three guide domain nucleobase sequences, specifically those described in Table 1 for G000486, G000502, or G000415. Guide domain modification patterns were assayed either the conserved region described in SEQ ID No. 695 or in a short-sgRNA format using the conserved region described in SEQ ID No. 253. The final data set contained 270 distinct guides and 45 unique modification patterns in the guide domain.

[1779] Rows 1-12 in Tables 9-12 show test guides assessed for editing efficacy with 2′OMe, 2′F, PS, and 2′H modifications at positions 5, 12, and 15. Rows 13-19 in Tables 9-12 show editing data for variants that substitute 2′F single modification for 2′F+PS modifications at positions 8-10. Rows 20-27 in Tables 9-12 show editing data for variants that substitute 2′F for PS at positions 4-20.

[1780] Editing was assayed in PCH and PHH cells as described in Example 1 with the following modifications. Cells were counted and plated at a density of 30,000-35,000 cells/well for PHH, and 40,000-60,000 cells/well for PCH Transfections used pre-mixed lipid formulations in which the lipid components were reconstituted in 100% ethanol at a molar ratio of 50% Lipid A, 9% DSPC, 38% cholesterol, and 3% PEG2k-DMG. The lipid mixture was then mixed with RNA cargos (e.g., Cas9 mRNA and gRNA) at a lipid amine to RNA phosphate (N:P) molar ratio of about 6.0. Transfections were performed with a final concentration of 100 nM gRNA, 3% cyno serum, and 50 ng Cas9 mRNA per well. Cells were incubated for approximately 48 hours before cell lysis and NGS analysis. The experiment was performed in duplicate. The editing results are described in Tables 9-12. Each row represents a single modification pattern design with the same conserved region. Rows 46-48 are controls.

[1781] The data were analyzed to estimate the impact of several variables, including whether the guide was or was not a short-sgRNA, variable region modification pattern, and individual modification position, where possible. Short-sgRNA guides were significantly more active than non-short-sgRNA guides in PCH (all sites) and PHH (G502 variants). In PCH, short-sgRNA guides added an additional 14% over equivalent non-short-sgRNAs.

[1782] Many of the modification patterns in this study were designed to incorporate and further test well tolerated modifications into highly modified gRNA molecules. In general this was successful; nearly all patterns showed similar activity to controls overall. A number of individual positions were also tested in this study. Position 5, 12 and 15 were modified individually. Position 5 was highly tolerant of modification. Position 12 was tolerant of PS, 2′-F and 2′-OMe, but was significantly sensitive to 2′-H modification (reduction of editing percentage by 7.5, p<0.00002). Position 15 was tolerant of 2′-H modification, but as in other work presented here, highly sensitive to 2′F and 2′OMe (p<10⁻¹³).

TABLE 9
Average Editing % in PHH cells
PHH

| | G000502 | | | G000486 | | | G000415 | | |
|---|---|---|---|---|---|---|---|---|---|
| Row | Variants | % Edit | SD | Variants | % Edit | SD | Variants | % Edit | SD |
| 1 | G014462 | 21.7% | 0.2% | G014507 | 57.0% | 0.3% | G014554 | 57.2% | 2.1% |
| 2 | G014463 | 21.4% | 1.7% | G014508 | 57.6% | 0.2% | G014555 | 56.0% | 0.4% |
| 3 | G014464 | 28.4% | 2.9% | G014509 | 58.6% | 2.5% | G014556 | 54.4% | 5.2% |
| 4 | G014465 | 23.7% | 1.0% | G014510 | 52.5% | 0.6% | G014557 | 54.9% | 1.3% |
| 5 | G014466 | 22.8% | 0.1% | G014511 | 54.4% | 0.6% | G014558 | 61.0% | 4.1% |
| 6 | G014467 | 27.9% | 2.3% | G014512 | 62.1% | 2.4% | G014559 | 63.4% | 0.1% |
| 7 | G014468 | 21.5% | 1.3% | G014513 | 57.6% | 0.7% | G014560 | 55.6% | 0.8% |
| 8 | G014469 | 12.6% | 0.3% | G014514 | 52.8% | 1.9% | G014561 | 39.0% | 0.6% |
| 9 | G014470 | 3.4% | 1.1% | G014515 | 35.5% | 1.2% | G014562 | 32.8% | 6.8% |
| 10 | G014471 | 9.1% | 0.6% | G014516 | 48.6% | 1.0% | G014563 | 33.0% | 6.7% |
| 11 | G014472 | 21.2% | 0.6% | G014517 | 55.5% | 0.1% | G014564 | 63.1% | 0.6% |
| 12 | G014473 | 18.0% | 0.9% | G014518 | 54.2% | 0.1% | G014565 | 55.2% | 2.5% |
| 13 | G014474 | 25.4% | 3.7% | G014519 | 52.3% | 0.7% | G014566 | 64.9% | 6.8% |
| 14 | G014475 | 31.5% | 3.3% | G014520 | 60.3% | 0.1% | G014567 | 55.2% | 0.3% |
| 15 | G014476 | 26.3% | 4.5% | G014521 | 56.5% | 0.4% | G014568 | 54.5% | 5.3% |
| 16 | G014477 | 28.2% | 2.1% | G014522 | 56.6% | 5.4% | G014569 | 59.7% | 0.7% |
| 17 | G014478 | 30.6% | 1.5% | G014523 | 64.7% | 0.2% | G014570 | 50.4% | 3.5% |
| 18 | G014479 | 32.3% | 0.3% | G014524 | 59.9% | 7.3% | G014571 | 56.7% | 3.3% |
| 19 | G014480 | 37.9% | 0.8% | G014525 | 65.1% | 2.1% | G014572 | 49.6% | 3.2% |
| 20 | G014481 | 27.8% | 0.4% | G014526 | 53.6% | 0.9% | G014573 | 44.0% | 0.4% |
| 21 | G014482 | 26.0% | 0.4% | G014527 | 54.1% | 1.2% | G014574 | 59.3% | 4.7% |
| 22 | G014483 | 23.8% | 3.3% | G014528 | 53.3% | 1.4% | G014575 | 50.8% | 7.6% |
| 23 | G014484 | 21.6% | 2.5% | G014529 | 47.6% | 0.5% | G014576 | 45.8% | 13.8% |
| 24 | G014485 | 21.6% | 3.7% | G014530 | 43.9% | 4.6% | G014577 | 56.1% | 5.2% |
| 25 | G014486 | 24.2% | 2.8% | G014531 | 52.8% | 4.6% | G014578 | 61.3% | 3.6% |
| 26 | G014487 | 25.9% | 3.3% | G014532 | 51.2% | 1.3% | G014579 | 48.9% | 7.8% |
| 27 | G014488 | 22.0% | 4.1% | G014533 | 49.9% | 5.4% | G014580 | 50.2% | 7.1% |
| 28 | G014489 | 34.7% | 3.0% | G014534 | 67.2% | 5.1% | G014581 | 54.2% | 5.5% |
| 29 | G014490 | 38.1% | 4.4% | G014535 | 65.6% | 4.6% | G014582 | 62.0% | 2.5% |
| 30 | G014491 | 34.8% | 1.8% | G014536 | 69.5% | 5.9% | G014583 | 51.8% | 6.6% |
| 31 | G014492 | 23.5% | 1.1% | G014537 | 66.8% | 2.0% | G014584 | 54.4% | 2.4% |
| 32 | G014493 | 38.9% | 6.1% | G014538 | 61.4% | 12.4% | G014585 | 53.7% | 15.2% |
| 33 | G014494 | 38.1% | 3.7% | G014539 | 61.0% | 3.7% | G014586 | 56.1% | 4.2% |
| 34 | G014495 | 33.4% | 1.3% | G014540 | 63.7% | 5.9% | G014587 | 60.0% | 5.9% |
| 35 | G014496 | 42.9% | 2.5% | G014541 | 64.0% | 4.2% | G014588 | 52.5% | 2.9% |
| 36 | G014497 | 39.0% | 3.7% | G014542 | 51.2% | 4.3% | G014589 | 56.8% | 4.3% |
| 37 | G014498 | 37.0% | 3.3% | G014543 | 70.7% | 2.7% | G014590 | 49.8% | 7.0% |
| 38 | G014499 | 34.9% | 0.3% | G014544 | 36.7% | 0.1% | G014591 | 50.3% | 2.3% |
| 39 | G014500 | 28.2% | 1.7% | G014545 | 52.8% | 0.0% | G014592 | 49.8% | 5.8% |
| 40 | G014501 | 30.5% | 2.0% | G014546 | 56.6% | 3.8% | G014593 | 53.4% | 4.5% |
| 41 | G014502 | 33.3% | 4.2% | G014547 | 53.4% | 3.9% | G014594 | 51.8% | 0.7% |
| 42 | G014503 | 28.8% | 2.5% | G014548 | 36.3% | 1.3% | G014595 | 55.6% | 2.5% |
| 43 | G014504 | 5.9% | 0.5% | G014549 | 64.6% | 2.3% | G014596 | 39.2% | 4.0% |
| 44 | G014505 | 0.2% | 0.0% | G014550 | 16.0% | 3.3% | G014597 | 0.4% | 0.3% |
| 45 | G014506 | 11.0% | 0.1% | G014551 | 49.6% | 1.6% | G014598 | 38.5% | 0.9% |
| 46 | G000502 | 51.4% | 3.3% | G000502 | 51.4% | 3.3% | G000502 | 53.5% | 3.1% |
| 47 | G010039 | 29.4% | 0.1% | G010039 | 29.4% | 0.1% | G010039 | 22.6% | 3.0% |
| 48 | G012401 | 56.9% | 0.1% | G012401 | 56.9% | 0.1% | G012401 | 52.2% | 4.7% |

TABLE 10
Average Editing % in PCH cells
PCH

| | G000502 | | | G000486 | | | G000415 | | |
|---|---|---|---|---|---|---|---|---|---|
| Row | Variants | % Edit | SD | Variants | % Edit | SD | Variants | % Edit | SD |
| 1 | G014462 | 54.6% | 2.5% | G014507 | 4.6% | 0.1% | G014554 | 46.8% | 8.1% |
| 2 | G014463 | 43.9% | 2.1% | G014508 | 5.2% | 0.7% | G014555 | 38.2% | 2.3% |
| 3 | G014464 | 50.6% | 5.1% | G014509 | 4.1% | 1.2% | G014556 | 34.1% | 2.1% |
| 4 | G014465 | 49.1% | 3.3% | G014510 | 3.2% | 1.8% | G014557 | 34.9% | 7.1% |
| 5 | G014466 | 51.3% | 9.2% | G014511 | 3.1% | 1.1% | G014558 | 37.5% | 4.3% |
| 6 | G014467 | 49.4% | 9.7% | G014512 | 6.2% | 2.0% | G014559 | 36.5% | 0.9% |
| 7 | G014468 | 48.2% | 4.7% | G014513 | 6.3% | 2.3% | G014560 | 36.1% | 7.0% |
| 8 | G014469 | 40.4% | 3.8% | G014514 | 2.5% | 1.1% | G014561 | 28.7% | 3.1% |
| 9 | G014470 | 31.2% | 7.8% | G014515 | 0.6% | 0.3% | G014562 | 20.7% | 1.4% |
| 10 | G014471 | 37.1% | 8.6% | G014516 | 1.8% | 0.5% | G014563 | 16.5% | 1.5% |
| 11 | G014472 | 50.3% | 12.4% | G014517 | 5.6% | 2.5% | G014564 | 45.1% | 3.0% |
| 12 | G014473 | 55.1% | 9.3% | G014518 | 7.1% | 0.9% | G014565 | 42.8% | 1.1% |
| 13 | G014474 | 47.6% | 6.1% | G014519 | 4.5% | 0.4% | G014566 | 46.8% | 2.9% |
| 14 | G014475 | 43.8% | 1.8% | G014520 | 5.5% | 1.7% | G014567 | 35.5% | 1.8% |
| 15 | G014476 | 38.2% | 10.0% | G014521 | 4.7% | 1.4% | G014568 | 32.7% | 4.9% |
| 16 | G014477 | 47.1% | 7.2% | G014522 | 5.7% | 3.5% | G014569 | 38.8% | 0.4% |
| 17 | G014478 | 45.9% | 4.4% | G014523 | 5.3% | 1.6% | G014570 | 28.9% | 1.8% |
| 18 | G014479 | 49.3% | 6.5% | G014524 | 7.1% | 2.1% | G014571 | 31.1% | 0.8% |
| 19 | G014480 | 49.3% | 11.9% | G014525 | 8.7% | 5.0% | G014572 | 28.0% | 1.6% |
| 20 | G014481 | 43.9% | 8.9% | G014526 | 6.3% | 1.3% | G014573 | 15.6% | 0.4% |
| 21 | G014482 | 43.6% | 4.2% | G014527 | 5.9% | 1.2% | G014574 | 30.6% | 4.1% |
| 22 | G014483 | 45.4% | 4.7% | G014528 | 5.4% | 0.4% | G014575 | 18.8% | 2.7% |
| 23 | G014484 | 43.6% | 6.7% | G014529 | 6.5% | 2.4% | G014576 | 33.2% | 9.5% |
| 24 | G014485 | 38.5% | 3.5% | G014530 | 6.8% | 1.6% | G014577 | 34.3% | 2.1% |
| 25 | G014486 | 32.0% | 0.3% | G014531 | 6.1% | 1.7% | G014578 | 44.1% | 7.9% |
| 26 | G014487 | 42.5% | 4.0% | G014532 | 5.8% | 0.7% | G014579 | 28.8% | 5.4% |
| 27 | G014488 | 32.3% | 7.6% | G014533 | 4.6% | 1.1% | G014580 | 31.9% | 4.7% |
| 28 | G014489 | 40.2% | 7.3% | G014534 | 9.0% | 0.6% | G014581 | 26.7% | 4.8% |
| 29 | G014490 | 35.3% | 7.7% | G014535 | 7.0% | 2.6% | G014582 | 32.4% | 1.5% |
| 30 | G014491 | 48.9% | 7.1% | G014536 | 7.9% | 1.3% | G014583 | 28.8% | 4.1% |
| 31 | G014492 | 38.8% | 9.2% | G014537 | 5.8% | 1.8% | G014584 | 29.5% | 1.6% |
| 32 | G014493 | 50.4% | 8.5% | G014538 | 7.6% | 1.9% | G014585 | 23.3% | 5.4% |
| 33 | G014494 | 50.5% | 6.7% | G014539 | 7.6% | 0.7% | G014586 | 27.2% | 3.1% |
| 34 | G014495 | 57.7% | 0.7% | G014540 | 7.4% | 1.8% | G014587 | 33.1% | 1.6% |
| 35 | G014496 | 49.3% | 1.9% | G014541 | 5.0% | 0.6% | G014588 | 34.5% | 10.9% |
| 36 | G014497 | 36.5% | 6.9% | G014542 | 16.7% | 1.8% | G014589 | 25.2% | 1.5% |
| 37 | G014498 | 39.2% | 7.5% | G014543 | 7.0% | 1.6% | G014590 | 21.9% | 1.6% |
| 38 | G014499 | 46.7% | 4.5% | G014544 | 1.8% | 0.6% | G014591 | 26.8% | 4.0% |
| 39 | G014500 | 37.1% | 10.0% | G014545 | 5.2% | 1.5% | G014592 | 19.9% | 1.2% |
| 40 | G014501 | 40.1% | 5.7% | G014546 | 4.9% | 0.7% | G014593 | 26.0% | 3.6% |
| 41 | G014502 | 43.1% | 3.7% | G014547 | 2.5% | 0.5% | G014594 | 22.8% | 1.8% |
| 42 | G014503 | 52.5% | 4.7% | G014548 | 1.7% | 0.8% | G014595 | 22.6% | 5.4% |
| 43 | G014504 | 13.1% | 8.0% | G014549 | 3.1% | 0.1% | G014596 | 20.6% | 7.4% |
| 44 | G014505 | 3.0% | 0.3% | G014550 | 0.6% | 0.0% | G014597 | 0.9% | 0.8% |
| 45 | G014506 | 44.1% | 2.0% | G014551 | 1.9% | 1.1% | G014598 | 24.6% | 9.1% |
| 46 | G000502 | 55.8% | 18.1% | G000502 | 55.8% | 18.1% | G000502 | 47.9% | 0.1% |
| 47 | G010039 | 44.4% | 8.0% | G010039 | 44.4% | 8.0% | G010039 | 39.4% | 10.6% |
| 48 | G012401 | 65.4% | 9.0% | G012401 | 65.4% | 9.0% | G012401 | 53.3% | 4.5% |

TABLE 11
Average Editing % in PHH cells for short-sgRNA guides
PHH - short-sgRNA

| | G000502 | | | G000486 | | | G000415 | | |
|---|---|---|---|---|---|---|---|---|---|
| Row | Variants | % Edit | SD | Variants | % Edit | SD | Variants | % Edit | SD |
| 1 | G014644 | 57.1% | 5.9% | G014689 | 43.4% | 0.4% | G014734 | 57.5% | 1.1% |
| 2 | G014645 | 49.4% | 2.5% | G014690 | 59.2% | 12.9% | G014735 | 63.2% | 2.2% |
| 3 | G014646 | 43.1% | 0.1% | G014691 | 63.6% | 0.6% | G014736 | 57.0% | 3.7% |
| 4 | G014647 | 41.0% | 1.0% | G014692 | 62.7% | 2.4% | G014737 | 61.1% | 1.6% |
| 5 | G014648 | 36.7% | 0.8% | G014693 | 60.6% | 2.5% | G014738 | 61.9% | 5.7% |
| 6 | G014649 | 44.9% | 0.8% | G014694 | 42.7% | 0.8% | G014739 | 61.7% | 1.9% |
| 7 | G014650 | 24.7% | 1.2% | G014695 | 61.1% | 2.5% | G014740 | 63.9% | 0.4% |
| 8 | G014651 | 25.9% | 2.3% | G014696 | 52.7% | 2.7% | G014741 | 47.9% | 0.4% |
| 9 | G014652 | 2.6% | 0.3% | G014697 | 33.4% | 3.0% | G014742 | 1.0% | 0.4% |
| 10 | G014653 | 12.0% | 0.6% | G014698 | 56.6% | 2.2% | G014743 | 39.4% | 2.4% |
| 11 | G014654 | 37.2% | 2.5% | G014699 | 59.1% | 3.0% | G014744 | 67.0% | 4.0% |
| 12 | G014655 | 34.4% | 2.8% | G014700 | 60.7% | 2.2% | G014745 | 22.1% | 5.2% |
| 13 | G014656 | 46.9% | 1.8% | G014701 | 52.3% | 14.2% | G014746 | 59.9% | 0.1% |
| 14 | G014657 | 48.7% | 1.9% | G014702 | 60.1% | 5.7% | G014747 | 56.0% | 10.7% |
| 15 | G014658 | 47.9% | 4.9% | G014703 | 62.9% | 2.0% | G014748 | 54.8% | 3.4% |
| 16 | G014659 | 43.4% | 3.0% | G014704 | 63.9% | 3.0% | G014749 | 59.7% | 0.4% |
| 17 | G014660 | 49.8% | 2.8% | G014705 | 68.4% | 2.1% | G014750 | 51.1% | 1.6% |
| 18 | G014661 | 44.1% | 4.1% | G014706 | 58.8% | 7.8% | G014751 | 55.0% | 4.5% |
| 19 | G014662 | 50.3% | 0.4% | G014707 | 68.3% | 2.2% | G014752 | 48.8% | 5.4% |
| 20 | G014663 | 45.0% | 1.2% | G014708 | 65.3% | 2.4% | G014753 | 62.8% | 5.9% |
| 21 | G014664 | 38.4% | 5.2% | G014709 | 54.7% | 0.6% | G014754 | 59.9% | 0.1% |
| 22 | G014665 | 34.6% | 1.2% | G014710 | 55.9% | 6.4% | G014755 | 36.8% | 1.8% |
| 23 | G014666 | 36.0% | 0.6% | G014711 | 57.5% | 2.8% | G014756 | 55.0% | 2.0% |
| 24 | G014667 | 44.8% | 1.7% | G014712 | 56.1% | 10.4% | G014757 | 55.8% | 4.1% |
| 25 | G014668 | 44.7% | 1.1% | G014713 | 61.2% | 0.8% | G014758 | 57.9% | 6.1% |
| 26 | G014669 | 44.7% | 2.2% | G014714 | 59.5% | 5.4% | G014759 | 51.3% | 11.9% |
| 27 | G014670 | 48.3% | 6.2% | G014715 | 60.2% | 1.6% | G014760 | 57.4% | 0.4% |
| 28 | G014671 | 50.4% | 1.3% | G014716 | 66.0% | 9.4% | G014761 | 7.0% | 0.1% |
| 29 | G014672 | 56.9% | 4.5% | G014717 | 68.9% | 4.9% | G014762 | 10.0% | 1.6% |
| 30 | G014673 | 51.0% | 1.1% | G014718 | 68.3% | 0.7% | G014763 | 12.5% | 0.0% |
| 31 | G014674 | 52.1% | 0.6% | G014719 | 68.6% | 0.1% | G014764 | 13.4% | 2.1% |
| 32 | G014675 | 51.4% | 2.7% | G014720 | 67.3% | 3.1% | G014765 | 36.2% | 3.2% |
| 33 | G014676 | 53.3% | 3.6% | G014721 | 69.2% | 1.9% | G014766 | 46.4% | 5.7% |
| 34 | G014677 | 52.2% | 3.9% | G014722 | 68.4% | 4.6% | G014767 | 37.9% | 4.5% |
| 35 | G014678 | 57.6% | 4.2% | G014723 | 64.3% | 4.1% | G014768 | 37.3% | 8.8% |
| 36 | G014679 | 53.2% | 4.6% | G014724 | 61.2% | 4.4% | G014769 | 39.6% | 0.6% |
| 37 | G014680 | 50.1% | 5.6% | G014725 | 63.6% | 0.8% | G014770 | 27.4% | 0.1% |
| 38 | G014681 | 40.4% | 2.5% | G014726 | 58.0% | 4.2% | G014771 | 60.0% | 0.5% |
| 39 | G014682 | 48.5% | 3.7% | G014727 | 60.0% | 3.1% | G014772 | 63.5% | 4.7% |
| 40 | G014683 | 48.3% | 6.6% | G014728 | 63.3% | 0.9% | G014773 | 57.9% | 0.6% |
| 41 | G014684 | 51.6% | 0.4% | G014729 | 65.3% | 1.8% | G014774 | 54.3% | 4.7% |
| 42 | G014685 | 21.6% | 3.4% | G014730 | 65.8% | 0.4% | G014775 | 49.8% | 2.4% |
| 43 | G014686 | 32.3% | 0.6% | G014731 | 64.0% | 5.1% | G014776 | 2.3% | 0.6% |
| 44 | G014687 | 0.2% | 0.0% | G014732 | 0.4% | 0.1% | G014777 | 0.1% | 0.0% |
| 45 | G014688 | 18.6% | 0.6% | G014733 | 45.2% | 4.8% | G014778 | 11.3% | 1.5% |
| 46 | G000502 | 46.5% | 0.4% | G000502 | 46.5% | 0.4% | G000502 | 44.9% | 12.2% |
| 47 | G010039 | 29.4% | 1.1% | G010039 | 29.4% | 1.1% | G010039 | 20.5% | 1.2% |
| 48 | G012401 | 51.8% | 5.8% | G012401 | 51.8% | 5.8% | G012401 | 59.8% | 1.6% |

TABLE 12
Average Editing % in PCH cells for short-sgRNA guides
PCH - short-sgRNA

| | G000502 | | | G000486 | | | G000415 | | |
|---|---|---|---|---|---|---|---|---|---|
| Row | Variants | % Edit | SD | Variants | % Edit | SD | Variants | % Edit | SD |
| 1 | G014644 | 76.6% | 2.2% | G014689 | 10.7% | 1.4% | G014734 | 53.2% | 0.4% |
| 2 | G014645 | 73.9% | 2.1% | G014690 | 20.4% | 2.8% | G014735 | 64.0% | 0.5% |
| 3 | G014646 | 73.0% | 1.9% | G014691 | 21.9% | 0.2% | G014736 | 50.5% | 2.0% |
| 4 | G014647 | 69.8% | 3.1% | G014692 | 20.1% | 2.3% | G014737 | 57.7% | 2.7% |
| 5 | G014648 | 71.1% | 1.5% | G014693 | 20.8% | 1.6% | G014738 | 58.0% | 2.0% |
| 6 | G014649 | 70.9% | 1.0% | G014694 | 13.2% | 0.2% | G014739 | 57.3% | 0.7% |
| 7 | G014650 | 69.3% | 3.2% | G014695 | 26.7% | 0.3% | G014740 | 56.3% | 7.8% |
| 8 | G014651 | 67.4% | 0.3% | G014696 | 10.1% | 0.6% | G014741 | 41.4% | 2.0% |
| 9 | G014652 | 51.4% | 2.6% | G014697 | 2.5% | 0.1% | G014742 | 2.7% | 0.4% |
| 10 | G014653 | 60.2% | 0.6% | G014698 | 8.4% | 2.2% | G014743 | 45.4% | 2.3% |
| 11 | G014654 | 70.5% | 0.0% | G014699 | 22.0% | 3.2% | G014744 | 62.8% | 2.4% |
| 12 | G014655 | 72.5% | 0.1% | G014700 | 19.4% | 2.8% | G014745 | 38.9% | 2.8% |
| 13 | G014656 | 72.3% | 0.0% | G014701 | 29.7% | 4.7% | G014746 | 59.6% | 5.2% |
| 14 | G014657 | 71.4% | 0.8% | G014702 | 27.8% | 3.5% | G014747 | 47.5% | 3.5% |
| 15 | G014658 | 70.9% | 3.5% | G014703 | 25.5% | 3.8% | G014748 | 46.9% | 4.4% |
| 16 | G014659 | 69.6% | 1.2% | G014704 | 27.0% | 1.6% | G014749 | 54.6% | 3.3% |
| 17 | G014660 | 68.2% | 1.1% | G014705 | 25.0% | 0.8% | G014750 | 44.3% | 1.5% |
| 18 | G014661 | 64.7% | 0.1% | G014706 | 23.0% | 0.7% | G014751 | 51.3% | 2.2% |
| 19 | G014662 | 67.7% | 2.8% | G014707 | 25.4% | 1.2% | G014752 | 43.0% | 0.8% |
| 20 | G014663 | 69.3% | 1.8% | G014708 | 26.2% | 1.3% | G014753 | 47.6% | 3.9% |
| 21 | G04664 | 67.7% | 0.3% | G014709 | 25.7% | 5.9% | G014754 | 52.5% | 3.5% |
| 22 | G014665 | 66.5% | 0.1% | G014710 | 20.6% | 0.8% | G014755 | 35.8% | 0.9% |
| 23 | G014666 | 66.5% | 5.7% | G014711 | 22.6% | 0.9% | G014756 | 52.4% | 3.6% |
| 24 | G014667 | 68.7% | 4.8% | G014712 | 27.3% | 1.9% | G014757 | 55.6% | 0.8% |
| 25 | G014668 | 66.7% | 0.5% | G014713 | 27.9% | 2.0% | G014758 | 51.3% | 4.2% |
| 26 | G014669 | 65.9% | 1.2% | G014714 | 24.1% | 4.2% | G014759 | 50.8% | 1.5% |
| 27 | G014670 | 64.9% | 2.5% | G014715 | 24.3% | 2.2% | G014760 | 49.6% | 1.1% |
| 28 | G014671 | 68.6% | 3.0% | G014716 | 21.4% | 5.0% | G014761 | 9.6% | 1.0% |
| 29 | G014672 | 66.3% | 2.1% | G014717 | 24.5% | 2.1% | G014762 | 10.4% | 1.8% |
| 30 | G014673 | 65.3% | 1.6% | G014718 | 21.7% | 2.7% | G014763 | 13.5% | 0.5% |
| 31 | G014674 | 67.8% | 9.9% | G014719 | 20.1% | 1.7% | G014764 | 13.9% | 1.4% |
| 32 | G014675 | 63.3% | 0.0% | G014720 | 31.6% | 6.9% | G014765 | 35.0% | 3.1% |
| 33 | G014676 | 67.6% | 0.5% | G014721 | 24.8% | 2.8% | G014766 | 36.5% | 1.8% |
| 34 | G014677 | 66.3% | 3.4% | G014722 | 31.9% | 0.8% | G014767 | 36.7% | 0.9% |
| 35 | G014678 | 73.3% | 1.0% | G014723 | 33.8% | 5.5% | G014768 | 38.8% | 0.8% |
| 36 | G014679 | 64.1% | 2.3% | G014724 | 25.9% | 1.6% | G014769 | 31.7% | 1.0% |
| 37 | G014680 | 66.0% | 0.8% | G014725 | 25.8% | 1.4% | G014770 | 23.3% | 2.1% |
| 38 | G014681 | 65.9% | 1.0% | G014726 | 22.4% | 1.5% | G014771 | 50.9% | 0.0% |
| 39 | G014682 | 72.4% | 1.9% | G014727 | 28.0% | 1.8% | G014772 | 56.6% | 0.4% |
| 40 | G014683 | 69.2% | 1.6% | G014728 | 24.3% | 0.9% | G014773 | 52.9% | 1.6% |
| 41 | G014684 | 66.5% | 0.8% | G014729 | 27.3% | 0.9% | G014774 | 47.8% | 1.5% |
| 42 | G014685 | 48.5% | 5.3% | G014730 | 27.4% | 0.9% | G014775 | 41.7% | 4.9% |
| 43 | G014686 | 62.8% | 1.6% | G014731 | 12.5% | 3.4% | G014776 | 3.4% | 0.6% |
| 44 | G014687 | 0.5% | 0.3% | G014732 | 0.6% | 0.0% | G014777 | 0.3% | 0.1% |
| 45 | G014688 | 64.0% | 0.8% | G014733 | 6.5% | 1.1% | G014778 | 19.8% | 1.3% |
| 46 | G000502 | 67.2% | 0.5% | G000502 | 67.2% | 0.5% | G000502 | 63.6% | 2.3% |
| 47 | G010039 | 53.0% | 0.4% | G010039 | 53.0% | 0.4% | G010039 | 49.8% | 4.6% |
| 48 | G012401 | 68.3% | 3.5% | G012401 | 68.3% | 3.5% | G012401 | 73.2% | 3.4% |

### Example 5—In Vitro Editing in Primary Human Hepatocytes (PHH), Primary Cynomolgus Hepatocytes (PCH), and HepG2

[1783] sgRNAs targeting the human TTR gene were designed as shown in Table 1 and transfected into primary cyno hepatocytes (PCH), primary human hepatocytes (PHH), and HepG2 cells in vitro at concentrations as indicated in the figures and editing efficiency (e.g., percent editing) was measured by NGS, as described in Example 1. The LNPs used in these transfections were made according to LNP Procedure C in Example 1(F).

[1784] Dose response curves of editing efficiency by concentration are shown in FIGS. 9A (PHH), 9B (PCH), and 9C (HepG2). Tables 13A (PHH), 13B (PCH), and 13C (HepG2) summarize the results of FIGS. 9A-9C.

TABLE 13A
(PHH)

| sgRNA | min | max | EC50 | EC50error |
|---|---|---|---|---|
| G000698 | 0.43 | 87 | 0.981624 | 0.224339 |
| G000699 | 0.37 | 83.33 | 1.275023 | 0.243757 |
| G000700 | 0.73 | 90.73 | 0.757331 | 0.270775 |
| G000701 | 0.2 | 84.93 | 1.000807 | 0.248197 |
| G000481 | 0.17 | 81.3 | 1.305533 | 0.28657 |
| G000499 | 0.4 | 85.17 | 1.15425 | 0.237993 |

TABLE 13B
(PCH)

| sgRNA | min | max | EC50 | EC50error |
|---|---|---|---|---|
| G000698 | 0.65 | 97.15 | 0.482751 | 0.085198 |
| G000699 | 0.55 | 97.25 | 1.295555 | 0.242115 |
| G000700 | 0.65 | 88.15 | 1.287722 | 0.279182 |
| G000701 | 0.2 | 87.05 | 1.619526 | 0.350191 |
| G000481 | 0.55 | 95.6 | 1.070419 | 0.241465 |
| G000499 | 0.25 | 84.15 | 3.242486 | 0.847014 |

TABLE 13C
(HepG2)

| sgRNA | min | max | EC50 |
|---|---|---|---|
| G000698 | 1.4 | 97.55 | 0.290574 |
| G000699 | 0.6 | 98.65 | 0.452265 |
| G000700 | 1 | 97.5 | 0.37081 |
| G000701 | 0.35 | 96.85 | 0.496062 |
| G000481 | 0.35 | 98.6 | 0.537527 |
| G000499 | 0.1 | 97.9 | 1.136589 |

### Example 6—Nuclease Susceptibility and Stability of sgRNAs

[1785] 5′- and 3′-end-labeled versions of G282, G480, G481, G502, and G504 were assayed as described in Example 1(K). Fragment lengths were mapped onto the G282 sequence (FIG. 11A) and cleavage was noted predominantly at CpA and UpA (i.e., pyrimidine-adenine or “YA”) sites (illustrated in FIG. 10B), consistent with an RNase A-like endonucleolytic pattern. See Leu et. al., J. Biol Chem, 278:7300-09 (2003) (reporting RNase A cleavage at CpA and UpA sites). The cleavage sites observed for G282 are illustrated schematically on a possible secondary structure of this molecule in FIG. 10B.

[1786] Cleavage was consistently observed following nucleotides 25, 45, 50, 64, and 67 in G282, G480, G481, G502, and G504 (except that for G481, there was little to no cleavage at position 25) (FIG. 11A-D). All of these positions are YA sites (labeled YA sites 1, 5, 6, 7, 8, and 9 in FIG. 10B). Furthermore, in the spacer region, cleavage was observed in a generally YA-dependent manner, for example, following position 16 of G480; positions 15 and 18 of G481; and positions 4, 8, 11, and 16 of G502 (FIG. 11B-D). Notably, modifications at YA positions led to reduced cleavage (e.g., following positions 2, 31, 37, 40, and 83). YA positions in which at least the Y was a 2′-OMe nucleotide did not show significant cleavage, consistent with 2′-O-methylation protecting the adjacent 3′linkage from cleavage by RNAse A.

[1787] G502 was compared to sgRNAs with additional modifications in the guide domain (FIGS. 12A-C). In particular, G9571 includes 2′-fluoro modifications at certain positions including 8-11 and PS modifications at certain positions including 8-10 as shown in the Sequence Table. G10015 includes a 2′-OMe modification at position 4, 2′-fluoro modifications at positions 8 and 11, and a PS modification at position 16.

[1788] In G9571, cleavage after positions 8 and 11 was reduced or eliminated, consistent with nuclease protection by the 2′-fluoro modifications of these positions (FIG. 12B).

[1789] In G10015, cleavage after positions 4, 8, and 11 was reduced or eliminated, consistent with nuclease protection by the 2′-OMe modification of position 4 and the 2′-fluoro modifications of positions 8 and 11 (FIG. 12C). Cleavage after position 16 also occurred at a somewhat reduced level relative to G502, suggesting partial protection by the phosphorothioate modification at that position.

[1790] Assays on G282, G480, G481, G502, G504, and G509 assembled into ribonucleoproteins (RNPs) with Cas9 were also performed using a higher HLC concentration of 8.5 mg/ml but otherwise following the procedure described above. The RNPs showed reduced susceptibility compared to the experiments using sgRNA alone despite the higher HLC concentration, indicating that the sgRNA within an RNP is less accessible to nuclease, but the cleavage pattern remained qualitatively similar, with most cleavage occurring at YA sites (data not shown).

[1791] G10039, which comprises modifications at all YA sites, was assayed with 0.01 mg/ml HLC and found to show only a very small amount of cleavage at position 16, consistent with protection by the phosphorothioate modification at that position (FIG. 13A). Minimal amounts of cleavage were detectable at certain additional (non-YA) sites, but nearly all of the starting material remained intact throughout the incubation.

[1792] G10039 (as free sgRNA) was also treated with 8.5 mg/ml HLC. Degradation increased at position 16 and was also observed at several other positions, some of which were not YA sites (FIG. 13B).

### Example 7—Editing following Transfection with sgRNAs with Modifications at YA Sites

[1793] A series of sgRNAs were designed by systematically introducing 2′-OMe modifications at individual YA sites in the conserved regions that were unmodified in G282. Thus, the sgRNAs sequentially numbered from G9989-G9994 have 2′-OMe modifications at positions 25, 45, 50, 56, 64, and 67, respectively, which are positions LS5, LS7, LS12, N6, N14, and N17 as shown in FIG. 10A. These are the pyrimidines of YA sites 1, 5, 6, 7, 8, and 9 as shown in FIG. 10B. The sgRNAs sequentially numbered from G10019-G10024 have the same 2′-OMe modifications as G9989-G9994, respectively, but the nucleobase sequence is identical to that of G502 instead of G282.

[1794] Similarly, a series of sgRNAs were designed by systematically introducing 2′-fluoro modifications at individual YA sites in the conserved regions that were unmodified in G282. Thus, the sgRNAs sequentially numbered from G9995-G10000 have 2′-fluoro modifications at positions 25, 45, 50, 56, 64, and 67, respectively. The sgRNAs sequentially numbered from G10025-G10030 have the same 2′-fluoro modifications as G9995-G10000, respectively, but the nucleobase sequence is identical to that of G502 instead of G282.

[1795] A further series of sgRNAs were designed by systematically introducing phosphorothioate modifications at individual YA sites in the conserved regions that were unmodified in G282. Thus, the sgRNAs sequentially numbered from G10001-G10006 have 2′-fluoro modifications at positions 25, 45, 50, 56, 64, and 67. The sgRNAs sequentially numbered from G10031-G10036 have the same phosphorothioate modifications as G10001-G10006, respectively, but the nucleobase sequence is identical to that of G502 instead of G282.

[1796] Also tested were guides modified with ENA (G9878, G10007, and G10008 had the G282 sequence, and G10037 and G10038 had the G502 sequence). The modifications in G10007 and G10037 were at the 45th and 50th nucleotides (positions LS7 and LS12 as indicated in FIG. 10A). The ENA in G9878 was at the three 5′-terminal nucleotides and the fourth to second nucleotides from the 3′ end. The ENA in G10008 and G10038 was at the 46th and 49th nucleotides (positions LS8 and LS11 as indicated in FIG. 10A).

[1797] Also tested were guides modified with deoxyribonucleotides (G9423-G9427) and UNA (G9879), all of which had the G282 sequence. The positions of the modifications in these guides are shown in the Sequence Table.

[1798] The guides described above were incorporated into lipoplexes and transfected into PMH as described above and percent editing was determined (FIG. 14 for guides matching the sequence of G282 and FIG. 15A for guides matching the sequence of G502). The guides with the sequence of G502 were also transfected into PCH and PHH as described above and percent editing was determined (FIG. 15B for PCH and FIG. 15C for PHH). The baseline reference (corresponding to the level of editing indicated by the dotted line) was G282 in FIGS. 14 and G502 in FIG. 15A. All of the 2′-OMe, 2′-fluoro, and phosphorothioate modifications introduced in G9989-G10006 and G10019-G10036 were tolerated in that editing activity did not substantially decrease. Additionally, the other modifications were generally tolerated as well. The ENA modification of positions 45-50 in G10007 and G10037 showed lower percent editing activity.

### Example 8—Primary Cell Editing following Transfection with sgRNAs

[1799] Several series of modified sgRNAs were designed based on the nucleobase sequences of G000282 and G000502. Specific modifications are described in Table 1. G00282 variants were assayed for editing in duplicate (unless otherwise noted) in primary mouse hepatocyte cells (PMH) in vitro. G000502 variants were similarly assayed in duplicate (unless otherwise noted) in primary cyno hepatocyte (PCH) and PMH cells in vitro. All data is reported in Tables 14 and 15 below.

[1800] A series of sgRNAs were designed assaying modifications in the guide domain combined with the modified conserved region described in SEQ ID No. 201. The sgRNAs sequentially numbered from G012421-G012425, G012689, G012690, G012426-G012431 have the same modifications as G012693-G012705, respectively, but the nucleobase sequence is identical to that of G000502 instead of 0000282. Data for these guides are presented in Table 14.

[1801] Similarly, a series of sgRNAs were designed assaying modifications in the conserved region combined with the modified guide domain of either the G0000502 variant, 6012402, or the modified guide domain of G000282 variant, G009533. The sgRNAs sequentially numbered from G012432-G012438, G012691, G012439-G012440, G012692 have the same modifications as G012706-G12716, respectively, but the nucleobase sequence is identical to that of G000502 instead of G000282. Data for these guides are presented in Table 14.

[1802] A further series of sgRNAs were designed combining various guide domain and conserved region modification patterns. The sgRNAs sequentially numbered from G012441-G012451 sequentially have the same modifications as G012717-G012727, respectively, but the nucleobase sequence is identical to that of G000502 instead of G000282. Data for these guides are presented in Table 14 and FIG. 31A-C.

[1803] Similarly, a series of sgRNAs were designed assaying modifications in the context of short single guide variants of G000282 and G000502. The sgRNAs sequentially numbered from G012452-G012461 are based on the short guide variant of G000502, specifically G012401. These modified variants have the same modifications as G012728-G12737, respectively, but the nucleobase sequence of G012728-G12737 is identical to that of G000639, the short guide variant of G000282. Data for this series of guides are presented in Table 14.

[1804] Lastly, a series of sgRNAs as indicated in Table 15 were designed assaying modifications in the nucleobase sequence of G000502 (See Table 1 for sgRNA nucleotide sequences). Data for this series of guides are presented in Table 15 and FIG. 23A-B.

TABLE 14
Primary cell editing with modified guides

| | PMH | | | PCH | | PMH | |
|---|---|---|---|---|---|---|---|
| G000282 | % | | G000502 | % | | % | |
| Variants | Editing | SD | Variants | Editing | SD | Editing | SD |
| G000282 | 81.0% | 3.7% | G000502 | 76.5% | 4.9% | 92.3% | 2.6% |
| G000639 | 83.4% | 1.6% | G012401 | 71.7% | 3.3% | 91.1% | 0.0% |
| G009559 | 70.9% | 0.4% | G009571 | 72.3% | 2.4% | 79.9% | 2.1% |
| G009985 | 91.3% | 2.1% | ND | ND | ND | ND | ND |
| G010009 | 72.9% | 0.5% | G010039 | 72.4% | 4.3% | 76.1% | 1.0% |
| G012693 | 90.2% | 0.4% | G012421 | 78.1% | 1.0% | 92.0% | 2.0% |
| G012694 | 89.9% | 0.4% | G012422 | 80.1% | 1.3% | 92.0% | 0.8% |
| G012695 | 88.7% | 0.7% | G012423 | 76.4% | 4.7% | 92.6% | 0.4% |
| G012696 | 85.7% | 0.8% | G012424 | 79.1% | 3.6% | 93.1% | 0.6% |
| G012697 | 87.8% | 0.7% | G012425 | 82.0% | 1.3% | 94.6% | 0.3% |
| G012698 | 68.7% | 0.8% | G012689 | 60.6% | 1.6% | 86.1% | 2.1% |
| G012699 | 68.1% | 1.8% | G012690 | 67.0% | 2.3% | 89.6% | 0.5% |
| G012700 | 73.9% | 0.1% | G012426 | 78.6% | 2.9% | 93.2% | 1.8% |
| G012701 | 75.7% | 1.6% | G012427 | 66.2% | 3.0% | 80.4% | 1.0% |
| G012702 | 69.4% | 0.1% | G012428 | 66.1% | 0.5% | 81.8% | 0.8% |
| G012703 | 86.3% | 2.6% | G012429 | 59.7% | ND | 79.3% | 1.7% |
| G012704 | 64.6% | 2.3% | G012430 | 65.6% | 0.8% | 75.8% | 1.8% |
| G012705 | 67.3% | 1.1% | G012431 | 64.1% | 0.6% | 76.3% | 2.5% |
| G012706 | 68.4% | 0.4% | G012432 | 53.8% | 5.1% | 70.8% | 1.7% |
| G012707 | 62.9% | 0.4% | G012433 | 63.2% | 1.6% | 76.7% | 0.1% |
| G012708 | 64.0% | 0.1% | G012434 | 53.1% | 3.0% | 67.0% | 0.4% |
| G012709 | 65.8% | 0.7% | G012435 | 62.2% | 0.4% | 70.7% | 0.4% |
| G012710 | 43.8% | 0.5% | G012436 | 47.3% | 3.3% | 64.9% | 2.8% |
| G012711 | 54.6% | 1.6% | G012437 | 51.2% | 4.7% | 67.7% | 0.2% |
| G012712 | 65.9% | 1.6% | G012438 | 60.0% | 1.3% | 68.7% | 2.1% |
| G012713 | 67.6% | 0.3% | G012691 | 61.5% | 9.0% | 74.4% | 0.5% |
| G012714 | 66.3% | 2.1% | G012439 | 39.4% | 1.8% | 58.0% | 4.3% |
| G012715 | 59.3% | 1.8% | G012440 | 40.4% | 3.2% | 65.5% | 3.3% |
| G012716 | 60.9% | 0.5% | G012692 | 43.8% | 1.5% | 63.1% | 0.1% |
| G012717 | 78.8% | 0.4% | G012441 | 56.8% | 0.3% | 85.3% | 0.8% |
| G012718 | 74.1% | 3.3% | G012442 | 65.6% | 1.5% | 90.0% | 0.3% |
| G012719 | 75.3% | 3.1% | G012443 | 67.0% | 2.0% | 88.8% | 0.6% |
| G012720 | 80.1% | 0.0% | G012444 | 68.7% | 1.2% | 90.9% | 0.1% |
| G012721 | 60.6% | 1.1% | G012445 | 44.9% | 1.1% | 79.3% | 2.3% |
| G012722 | 67.8% | 1.1% | G012446 | 56.4% | 4.2% | 85.2% | 1.6% |
| G012723 | 83.3% | 0.7% | G012447 | 68.4% | 1.5% | 88.5% | 0.6% |
| G012724 | 82.9% | 0.7% | G012448 | 79.0% | 3.0% | 94.5% | 0.5% |
| G012725 | 88.5% | 2.5% | G012449 | 66.4% | 10.3% | 84.7% | 0.4% |
| G012726 | 62.6% | 1.3% | G012450 | 53.3% | 0.9% | 70.2% | 2.5% |
| G012727 | 80.4% | 1.9% | G012451 | 54.4% | 2.0% | 81.6% | 0.7% |
| G012728 | 65.7% | 2.0% | G012452 | 65.2% | ND | 73.4% | 0.8% |
| G012729 | 65.9% | 3.7% | G012453 | 67.5% | 0.5% | 75.4% | 0.1% |
| G012730 | 63.4% | 2.7% | G012454 | 60.7% | 0.1% | 75.3% | 0.4% |
| G012731 | 67.4% | 3.8% | G012455 | 63.8% | 1.1% | 71.9% | 1.4% |
| G012732 | 69.7% | 0.0% | G012456 | 65.5% | 0.1% | 73.3% | 0.8% |
| G012733 | 70.1% | 2.9% | G012457 | 70.0% | 10.9% | 76.5% | 1.1% |
| G012734 | 65.2% | 1.4% | G012458 | 52.5% | 2.1% | 73.8% | 3.5% |
| G012735 | 59.9% | 0.7% | G012459 | 55.7% | 4.4% | 74.7% | 0.3% |
| G012736 | 55.0% | 0.8% | G012460 | 38.7% | 1.1% | 61.6% | 4.1% |
| G012737 | 61.7% | 2.8% | G012461 | 51.1% | 0.1% | 69.6% | 1.1% |
| G012741 | 70.7% | 3.6% | G012402 | 71.3% | 2.8% | 77.7% | 0.8% |

TABLE 15
Primary Cell editing with Modified guides

| | | |
|---|---|---|
| G000502 | PCH | PMH |

| Variants | % Editing | SD | % Editing | SD |
|---|---|---|---|---|
| G000502 | 76.5% | 4.9% | 92.3% | 2.6% |
| G012742 | 51.6% | 4.2% | 63.1% | 1.8% |
| G012743 | 49.9% | 3.5% | 64.1% | 1.6% |
| G012973 | 0.5% | 0.4% | 0.6% | 0.2% |
| G012974 | 3.3% | 1.5% | 4.4% | 1.7% |
| G012975 | 19.3% | 4.0% | 39.1% | 2.2% |
| G012976 | 2.8% | 0.5% | 7.3% | 1.5% |
| G012977 | 20.1% | 0.6% | 22.4% | 3.3% |
| G012978 | 38.3% | 3.5% | 60.1% | 3.3% |
| G012979 | 23.0% | 0.2% | 29.3% | 3.7% |

### Example 9—In Vitro Editing of Modified Guides Targeting HAO1 and SERPINA1

[1805] Lipid nanoparticle (LNP) formulations of modified sgRNAs targeting were tested on primary human hepatocytes and primary cynomolgus hepatocytes in a dose response assay with guides targeting the human genes HAO1 or LDHA. All methods are as described in Example 1 unless otherwise noted. Both cell lines were incubated at 37° C., 5% CO₂ for 48 hours prior to treatment with LNPs. LNPs were incubated in media containing 3% cynomolgus serum at 37° C. for 10 minutes and administered to cells in amounts as further provided herein. Post-incubation the LNPs were added to the human or cynomolgus hepatocytes in an 8 point 3-fold dose response curve starting at 300 ng Cas9 mRNA. The cells were lysed 96 hours post-treatment for NGS analysis as described in Example 1

[1806] Table 16 shows the average editing and standard deviation the tested control sgRNAs at 10.75 nM delivered with Spy Cas9 via LNP in PHH and PCH. These samples were generated in triplicate.

TABLE 16
Primary cell editing with modified guides
targeting HAO1 at 10.75 nM guide.

| Cell type | GUIDE | Edit | SD |
|---|---|---|---|
| PHH | G000480 | 0.990 | 0.002 |
| | G000502 | 0.909 | 0.022 |
| PCH | G000480 | 0.095 | 0.018 |
| | G000502 | 0.912 | 0.012 |

[1807] Table 17 shows the average editing and standard deviation for sgRNAs targing HAO1 delivered with Spy Cas9 via LNP to PHH or PCH. These samples were generated in at least duplicate. The dose response curve plot for these data are shown in FIGS. 27A-D and 28A-D.

[1808] Table 18 shows the average editing and standard deviation for sgRNAs targeting SerpinA1 delivered with Spy Cas9 via LNP to PHH. G000480 and G000502 are controls that target TTR. These samples were generated in at least duplicate. The dose response curve plot for these data are shown in FIGS. 25A-E.

[1809] Table 19 shows the average editing and standard deviation for sgRNAs targeting SerpinA1 delivered with Spy Cas9 via LNP to PCH. G000480 and G000502 are controls that target TTR. These samples were generated in at least duplicate. The dose response curve plot for these data are shown in FIGS. 26A-E.

TABLE 17
Editing in primary cells with modified guides targeting HAO1

| Guide (nM) | | 32.260 | | 10.753 | | 3.584 | | 1.195 | | 0.398 | | 0.133 | | 0.044 | | 0.015 | |
|---|---|---|---|---|---|---|---|---|---|---|---|---|---|---|---|---|---|
| | Guide | % Edit | SD | Edit | SD | Edit | SD | Edit | SD | Edit | SD | Edit | SD | Edit | SD | Edit | SD |
| PHH | G009428 | 97.7 | 0.2 | 98.0 | 0.5 | 94.5 | 1.5 | 86.9 | 2.2 | 67.4 | 2.5 | 39.7 | 3.8 | 13.6 | 0.9 | 2.7 | 1.0 |
| | G013964 | 98.5 | 0.4 | 98.5 | 0.4 | 96.1 | 0.8 | 91.0 | 1.3 | 77.1 | 1.6 | 59.1 | 14.7 | 19.6 | 2.5 | 3.9 | 0.8 |
| | G013968 | 96.8 | 0.8 | 97.5 | 0.4 | 90.8 | 1.4 | 78.1 | 1.7 | 46.4 | 3.5 | 25.9 | 19.9 | 2.9 | 0.8 | 0.8 | 0.3 |
| | G009429 | 98.9 | 0.1 | 98.4 | 0.5 | 91.3 | 0.6 | 80.9 | 1.9 | 52.9 | 1.3 | 21.7 | 3.0 | 5.5 | 0.7 | 0.7 | 0.3 |
| | G013965 | 98.4 | 0.6 | 98.2 | 0.2 | 93.9 | 1.2 | 83.0 | 1.1 | 59.6 | 2.1 | 45.3 | 21.4 | 7.5 | 0.6 | 1.1 | 0.1 |
| | G013969 | 98.8 | 0.3 | 98.6 | 0.2 | 94.9 | 0.3 | 85.3 | 0.3 | 62.9 | 1.8 | 38.9 | 20.6 | 6.5 | 1.0 | 0.6 | 0.3 |
| | G009430 | 96.2 | 0.4 | 96.3 | 0.3 | 88.4 | 1.8 | 76.9 | 0.4 | 47.8 | 2.0 | 20.0 | 3.8 | 4.3 | 1.1 | 0.5 | 0.1 |
| | G013966 | 97.0 | 0.5 | 97.1 | 0.3 | 92.4 | 1.0 | 80.6 | 2.8 | 52.6 | 1.2 | 31.2 | 16.9 | 3.7 | 0.7 | 0.5 | 0.2 |
| | G013970 | 97.5 | 0.1 | 97.0 | 0.2 | 90.8 | 0.4 | 76.4 | 3.4 | 47.2 | 3.5 | 25.6 | 16.8 | 3.5 | 0.7 | 0.5 | 0.1 |
| | G009432 | 94.8 | 2.1 | 93.1 | 0.7 | 83.9 | 1.9 | 69.8 | 2.1 | 41.9 | 2.0 | 15.8 | 1.5 | 3.2 | 0.5 | 0.5 | 0.3 |
| | G013967 | 94.2 | 0.4 | 93.5 | 0.8 | 84.8 | 0.6 | 68.5 | 4.2 | 40.6 | 1.8 | 24.0 | 14.3 | 3.5 | 0.8 | 0.5 | 0.2 |
| | G013971 | 93.6 | 0.2 | 92.6 | 0.6 | 83.2 | 2.0 | 61.6 | 1.6 | 36.5 | 2.5 | 21.6 | 14.1 | 2.2 | 0.6 | 0.3 | 0.3 |
| PCH | G009428 | 92.8 | 2.4 | 83.6 | 5.5 | 65.1 | 5.5 | 30.8 | 4.8 | 9.9 | 2.9 | 3.7 | 1.5 | 0.7 | 0.2 | 0.4 | 0.2 |
| | G013964 | 96.3 | 0.5 | 92.4 | 3.1 | 77.6 | 3.9 | 51.4 | 6.6 | 24.7 | 0.0 | 5.8 | ND | 3.2 | 1.3 | 0.8 | 0.2 |
| | G013968 | 87.5 | 0.1 | 84.9 | 4.6 | 57.4 | 1.2 | 22.0 | ND | 6.2 | 0.3 | 1.8 | 0.8 | 1.4 | 0.7 | 0.4 | 0.3 |
| | G009429 | 96.3 | 1.6 | 81.5 | 9.8 | 53.3 | 1.9 | 21.9 | 5.5 | 4.0 | 0.6 | 1.2 | 0.5 | 0.3 | 0.2 | 0.2 | 0.1 |
| | G013965 | 95.2 | 0.6 | 89.5 | 1.1 | 62.6 | 0.5 | 28.4 | 3.2 | 7.7 | 0.9 | 2.1 | 0.3 | 0.3 | 0.2 | 0.2 | 0.1 |
| | G013969 | 98.1 | 0.7 | 93.1 | 3.1 | 70.0 | 0.5 | 38.5 | 1.6 | 11.6 | 1.4 | 2.6 | 0.2 | 0.7 | 0.3 | 0.3 | 0.1 |
| | G009430 | 94.4 | 2.8 | 90.4 | 3.9 | 74.6 | 1.0 | 42.3 | 2.8 | 15.6 | 0.4 | 3.0 | 0.9 | 0.8 | 0.1 | 0.2 | 0.1 |
| | G013966 | 95.3 | 0.7 | 93.8 | 1.0 | 77.9 | 0.8 | 51.8 | 4.2 | 23.2 | 1.7 | 6.5 | 1.0 | 1.5 | 0.5 | 0.3 | 0.2 |
| | G013970 | 95.9 | 1.6 | 95.3 | 0.2 | 79.3 | 1.4 | 50.6 | 0.3 | 23.4 | 0.7 | 6.2 | 1.0 | 1.4 | 0.2 | 0.2 | 0.1 |
| | G009432 | 94.1 | 0.8 | 89.2 | 3.6 | 67.5 | 3.5 | 39.2 | 1.8 | 13.3 | 1.2 | 2.3 | 0.9 | 1.3 | 0.6 | 0.5 | 0.1 |
| | G013967 | 92.2 | 0.8 | 88.7 | 0.8 | 67.3 | 3.9 | 38.0 | 1.9 | 15.3 | 1.3 | 4.3 | 1.0 | 1.5 | 0.2 | 0.4 | 0.1 |
| | G013971 | 95.5 | 1.0 | 94.4 | 1.2 | 74.2 | 2.1 | 45.1 | 2.4 | 17.2 | 3.2 | 4.5 | 1.4 | 1.0 | 0.1 | 0.4 | 0.1 |

TABLE 18
Editing in PHH with modified guides targeting SerpinA1.

| guide (nM) | | 33.3 | | 11.1 | | 3.7 | | 1.23 | | 0.41 | | 0.14 | | 0.05 | |
|---|---|---|---|---|---|---|---|---|---|---|---|---|---|---|---|
| | Guide | Edit | SD | Edit | SD | Edit | SD | Edit | SD | Edit | SD | Edit | SD | Edit | SD |
| PHH | G000480 | 96.6 | 0.1 | 95.5 | 0.1 | 94.7 | 0.7 | 91.9 | 0.4 | 85.2 | 0.6 | 70.4 | 4.7 | 41.4 | 1.8 |
| | G000486 | 95.0 | 0.8 | 91.8 | 0.6 | 87.1 | 0.6 | 71.7 | 1.6 | 47.3 | 4.5 | 22.3 | 2.1 | 8.5 | 1.3 |
| | G000407 | 77.3 | 1.7 | 79.9 | 3.7 | 66.7 | 7.4 | 48.0 | 2.1 | 27.2 | 5.3 | 12.0 | 1.1 | 5.2 | 0.6 |
| | G013954 | 76.2 | 4.2 | 73.1 | 6.4 | 65.1 | 7.0 | 39.2 | 8.9 | 22.5 | 3.3 | 10.9 | 2.7 | 4.4 | 0.8 |
| | G013959 | 73.6 | 0.4 | 77.3 | 2.9 | 69.1 | 1.3 | 48.8 | 5.5 | 29.5 | 6.7 | 13.4 | 4.3 | 7.0 | 1.3 |
| | G000415 | 93.4 | 0.8 | 91.6 | 1.3 | 90.6 | 1.2 | 86.6 | 1.7 | 77.0 | 3.3 | 56.7 | 6.8 | 34.7 | 4.3 |
| | G013958 | 93.6 | 0.1 | 92.1 | 1.8 | 89.4 | 1.3 | 85.5 | 1.5 | 73.8 | 2.7 | 52.4 | 5.9 | 28.7 | 2.6 |
| | G013963 | 90.9 | 0.1 | 90.7 | 1.3 | 91.7 | 1.8 | 88.4 | 1.1 | 83.6 | 1.5 | 68.6 | 7.2 | 37.4 | 6.8 |
| | G000408 | 91.7 | 2.4 | 88.0 | 0.0 | 84.3 | 1.5 | 74.6 | 2.7 | 48.8 | 6.3 | 21.7 | 2.5 | 6.7 | 0.7 |
| | G000413 | 49.3 | 59.1 | 85.1 | 60.2 | 77.9 | 55.1 | 58.1 | 41.1 | 31.1 | 22.0 | 14.8 | 10.5 | 5.1 | 3.6 |
| | G000409 | 93.2 | 0.6 | 91.1 | 2.3 | 86.9 | 0.4 | 80.9 | 1.4 | 57.7 | 2.9 | 31.9 | 0.8 | 9.3 | 0.4 |
| | G013955 | 95.3 | 0.8 | 93.1 | 1.3 | 88.0 | 1.2 | 82.5 | 0.4 | 63.4 | 2.3 | 37.8 | 0.1 | 13.4 | 0.8 |
| | G013960 | 94.8 | 0.1 | 91.6 | 1.8 | 89.5 | 1.2 | 85.9 | 0.6 | 73.6 | 4.5 | 43.4 | 0.6 | 19.3 | 0.5 |
| | G000412 | 96.0 | 67.9 | 88.6 | 62.6 | 88.1 | 62.3 | 80.8 | 57.1 | 68.8 | 48.6 | 30.6 | 21.6 | 9.0 | 6.4 |
| | G013956 | 46.0 | 65.1 | 91.0 | 0.4 | 89.7 | 63.4 | 83.1 | 58.8 | 64.2 | 45.4 | 30.4 | 21.5 | 15.2 | 10.7 |
| | G013961 | 95.0 | 67.2 | 92.6 | 65.5 | 90.8 | 64.2 | 79.3 | 56.1 | 51.3 | 36.3 | 20.8 | 14.7 | 7.0 | 4.9 |
| | G000414 | 95.0 | 0.4 | 91.6 | 1.6 | 89.8 | 0.4 | 82.9 | 0.2 | 63.6 | 1.7 | 34.0 | 1.7 | 14.0 | 0.3 |
| | G013962 | 57.6 | 53.5 | 48.5 | 58.7 | 89.0 | 62.9 | 80.8 | 57.1 | 62.7 | 44.3 | 14.4 | 20.3 | 14.7 | 10.4 |
| | G013957 | 92.3 | 65.3 | 46.0 | 62.4 | 88.8 | 62.8 | 80.9 | 57.2 | 60.4 | 42.7 | 30.3 | 21.4 | 13.9 | 9.8 |

TABLE 19
Editing in PCH with modified guides targeting SerpinA1.

| guide (nM) | | 33.3 | | 11.1 | | 3.7 | | 1.23 | | 0.41 | | 0.14 | | 0.05 | |
|---|---|---|---|---|---|---|---|---|---|---|---|---|---|---|---|
| | Guide | Edit | SD | Edit | SD | Edit | SD | Edit | SD | Edit | SD | Edit | SD | Edit | SD |
| PCH | G000480 | 19.0 | 1.9 | 3.7 | 0.9 | 1.2 | 0.3 | 0.3 | 0.1 | 0.1 | 0.0 | 0.1 | 0.0 | 0.1 | 0.0 |
| | G000502 | 82.8 | 9.8 | 73.0 | 10.2 | 61.8 | 11.0 | 41.2 | 2.3 | 18.5 | 1.2 | 6.3 | 0.4 | 3.0 | 0.2 |
| | G000407 | 64.4 | 9.0 | 48.2 | 6.7 | 27.8 | 7.4 | 13.3 | 0.8 | 5.4 | 0.1 | 1.9 | 0.9 | 0.6 | 0.1 |
| | G013954 | 52.3 | 16.3 | 39.3 | 6.4 | 23.4 | 7.4 | 10.8 | 2.1 | 4.4 | 3.1 | 2.1 | 1.6 | 1.1 | 0.1 |
| | G013959 | 65.6 | 9.8 | 46.3 | 9.4 | 31.4 | 7.2 | 15.7 | 4.5 | 4.9 | 0.8 | 2.2 | 0.1 | 1.2 | 0.6 |
| | G000415 | 87.0 | 7.0 | 74.2 | 5.7 | 59.3 | 7.4 | 32.4 | 3.5 | 10.3 | 2.4 | 4.3 | 0.5 | 1.7 | 0.1 |
| | G013958 | 90.7 | 4.9 | 77.0 | 9.3 | 60.3 | 7.5 | 33.7 | 0.2 | 11.9 | 0.7 | 4.8 | 1.1 | 1.9 | 0.5 |
| | G013963 | 89.2 | 4.9 | 83.5 | 2.2 | 71.9 | 4.7 | 47.5 | 1.8 | 19.9 | 3.0 | 7.7 | 1.1 | 2.5 | 0.4 |
| | G000408 | 22.4 | 0.2 | 7.1 | 0.6 | 1.7 | 0.1 | 0.6 | 0.1 | 0.1 | 0.1 | 0.0 | 0.0 | 0.1 | 0.1 |
| | G000413 | 7.0 | 0.1 | 1.7 | 0.1 | 0.4 | 0.1 | 0.1 | 0.0 | 0.1 | 0.0 | 0.2 | 0.0 | 0.2 | 0.1 |
| | G000409 | 71.9 | 0.5 | 46.8 | 0.7 | 14.7 | 0.3 | 3.4 | 0.0 | 1.2 | 0.1 | 0.2 | 0.1 | 0.2 | 0.1 |
| | G013955 | 85.0 | 4.1 | 60.7 | 1.1 | 35.2 | 2.8 | 10.8 | 0.8 | 3.4 | 1.4 | 1.4 | 0.6 | 0.3 | 0.1 |
| | G013960 | 86.4 | 0.8 | 63.9 | 0.6 | 37.5 | 2.0 | 12.4 | 3.6 | 4.6 | 2.3 | 1.0 | 0.5 | 0.3 | 0.3 |
| | G000412 | 82.7 | 6.0 | 57.1 | 0.5 | 34.1 | 1.4 | 11.0 | 2.6 | 4.4 | 1.5 | 1.2 | 0.8 | 0.1 | 0.0 |
| | G013956 | 81.9 | 2.0 | 64.2 | 0.9 | 40.7 | 1.6 | 18.8 | 1.2 | 7.3 | 0.7 | 1.3 | 0.8 | 0.4 | 0.1 |
| | G013961 | 72.8 | 18.2 | 70.6 | 3.6 | 43.3 | 3.5 | 22.8 | 3.9 | 6.1 | 1.7 | 1.4 | 0.1 | 0.4 | 0.1 |
| | G000414 | 76.5 | 1.6 | 42.2 | 3.3 | 25.1 | 3.4 | 8.1 | 0.1 | 2.8 | 0.5 | 0.8 | 0.6 | 0.1 | 0.0 |
| | G013957 | 82.3 | 5.2 | 50.6 | 7.0 | 26.4 | 2.1 | 10.2 | 1.0 | 3.8 | 0.4 | 1.2 | 0.3 | 1.2 | 0.3 |
| | G013962 | 76.8 | 0.4 | 46.1 | 1.5 | 24.3 | 2.5 | 10.2 | 1.8 | 2.8 | 0.6 | 0.9 | 0.1 | 0.6 | 0.2 |

### Example 10—In Vivo Studies of Short-sgRNA

[1810] LNPs prepared as described above in Example 1(F), comprising chemically synthesized sgRNAs (including short-sgRNAs) targeting the mouse TTR gene and IVT Cas9 mRNA in a 1:1 weight ratio, were administered to CD-1 female mice (N indicated below) or Sprague-Dawley female rats as described above in Example 1(H). Eight days post dose at necropsy, livers and blood were collected for NGS measurements of editing efficiency and serum TTR analysis, respectively, as described above in Example 1. Animals were weighed 24 hours post dose for overall wellness assessment.

[1811] FIGS. 1A and 1B show the editing efficiency and TTR protein levels, respectively, for LNPs containing the sgRNAs indicated in Tables 20A and 20B, which all target the same sequence in the TTR gene (See Table 1 for sgRNA nucleotide sequences). G000211 and G000282 served as reference comparators. The LNPs were made according to LNP Procedure B in Example 1(F). The data shown in FIGS. 1A and 1B are from mice administered 0.1 mg/kg (mpk) or 0.3 mg/kg of LNPs and are summarized in Tables 20A and 20B.

TABLE 20A

| Guide | Average Editing (%) | Std. Dev. | N |
|---|---|---|---|
| TSS | 0.14 | 0.05477 | 5 |
| G000282 - 0.3 mpk | 59.64 | 6.213 | 5 |
| G000282 - 0.1 mpk | 14.12 | 2.286 | 5 |
| G000515 - 0.3 mpk | 37.28 | 11.9 | 5 |
| G000515 - 0.1 mpk | 15.56 | 8.138 | 5 |
| G000621 - 0.3 mpk | 37.04 | 12.41 | 5 |
| G000621 - 0.1 mpk | 6.88 | 2.826 | 5 |
| G000632 - 0.3 mpk | 38.72 | 6.406 | 5 |
| G000632 - 0.1 mpk | 8.58 | 7.482 | 5 |
| G000638 - 0.3 mpk | 42.1 | 12.23 | 5 |
| G000638 - 0.1 mpk | 15.08 | 7.851 | 5 |
| G000639 - 0.3 mpk | 54.58 | 17.3 | 5 |
| G000639 - 0.1 mpk | 20.1 | 6.038 | 5 |
| G000640 - 0.3 mpk | 48.62 | 11.09 | 5 |
| G000640 - 0.1 mpk | 19.52 | 10.68 | 5 |
| G000641 - 0.3 mpk | 46.96 | 6.204 | 5 |
| G000641 - 0.1 mpk | 9.68 | 1.63 | 5 |
| G000211 - 0.3 mpk | 18.62 | 12.89 | 5 |
| G000211 - 0.1 mpk | 2.08 | 0.8044 | 5 |

TABLE 20B

| Guide | Average Serum TTR (μg/mL) | SD | N |
|---|---|---|---|
| TSS | 969.4 | 215.2 | 5 |
| G000282 - 0.3 mpk | 178.7 | 131.2 | 5 |
| G000282 - 0.1 mpk | 883.1 | 92.82 | 5 |
| G000515 - 0.3 mpk | 529.5 | 174.9 | 5 |
| G000515 - 0.1 mpk | 869.4 | 227.8 | 5 |
| G000621 - 0.3 mpk | 523 | 167.9 | 5 |
| G000261 - 0.1 mpk | 920.8 | 162.6 | 5 |
| G000632 - 0.3 mpk | 449.4 | 66.61 | 5 |
| G000632 - 0.1 mpk | 971.5 | 195.1 | 5 |
| G000638 - 0.3 mpk | 452.4 | 163.8 | 5 |
| G000638 - 0.1 mpk | 934 | 242.6 | 5 |
| G000639 - 0.3 mpk | 261.9 | 202.9 | 5 |
| G000639 - 0.1 mpk | 726.2 | 122.1 | 5 |
| G000640 - 0.3 mpk | 363.3 | 172 | 5 |
| G000640 - 0.1 mpk | 752.7 | 233.8 | 5 |
| G000641 - 0.3 mpk | 419 | 77.43 | 5 |
| G000641 - 0.1 mpk | 1018 | 58.16 | 5 |
| G000211 - 0.3 mpk | 692.4 | 157 | 5 |
| G000211 - 0.1 mpk | 970.3 | 113.7 | 5 |

[1812] FIGS. 2A and 2B show the editing efficiency and TTR protein levels, respectively, for LNPs containing the sgRNAs indicated in Tables 21A and 21B, which all target the same sequence in the TTR gene (See Table 1 for sgRNA nucleotide sequences). G000269 and G000283 served as reference comparators. The LNPs were made according to LNP Procedure B in Example 1(F). The data shown in FIGS. 2A and 2B are from mice administered 0.1 mg/kg (mpk) or 0.3 mg/kg of LNPs and are summarized in Tables 21A and 21B.

TABLE 21A

| Guide | Average Editing (%) | Std. Dev. | N |
|---|---|---|---|
| TSS | 0.12 | 0.0447214 | 5 |
| G000269 - 0.3 mpk | 8.94 | 2.65763 | 5 |
| G000269 - 0.1 mpk | 2.86 | 1.94756 | 5 |
| G000620 - 0.3 mpk | 24.62 | 5.66675 | 5 |
| G000620 - 0.1 mpk | 10.48 | 12.0136 | 5 |
| G000622 - 0.3 mpk | 14.08 | 3.20422 | 5 |
| G000622 - 0.1 mpk | 4.5 | 2.01122 | 5 |
| G000623 - 0.3 mpk | 14.8 | 9.48868 | 5 |
| G000623 - 0.1 mpk | 3.08 | 1.26768 | 5 |
| G000624 - 0.3 mpk | 32.86 | 12.3545 | 5 |
| G000624 - 0.1 mpk | 7.76 | 4.60196 | 5 |
| G000625 - 0.3 mpk | 41.28 | 6.99085 | 5 |
| G000625 - 0.1 mpk | 15.62 | 5.79974 | 5 |
| G000626 - 0.3 mpk | 37.7 | 13.1164 | 5 |
| G000626 - 0.1 mpk | 7.42 | 3.25146 | 5 |
| G000627 - 0.3 mpk | 27.86 | 12.5293 | 5 |
| G000627 - 0.1 mpk | 6.46 | 1.60094 | 5 |
| G000283 - 0.3 mpk | 40.14 | 6.59416 | 5 |
| G000283 - 0.1 mpk | 19.42 | 12.1568 | 5 |

TABLE 21B

| Guide | Average Serum TTR (μg/mL) | Std. Dev. | N |
|---|---|---|---|
| TSS | 970.798 | 154.875 | 5 |
| G000269 - 0.3 mpk | 859.012 | 244.538 | 5 |
| G000269 - 0.1 mpk | 769.096 | 101.675 | 5 |
| G000620 - 0.3 mpk | 595.108 | 218.142 | 5 |
| G000620 - 0.1 mpk | 614.304 | 117.668 | 5 |
| G000622 - 0.3 mpk | 537.89 | 35.5731 | 5 |
| G000622 - 0.1 mpk | 816.786 | 190.52 | 5 |
| G000623 - 0.3 mpk | 515.142 | 189.776 | 5 |
| G000623 - 0.1 mpk | 713.03 | 158.231 | 5 |
| G000624 - 0.3 mpk | 352.896 | 157.573 | 5 |
| G000624 - 0.1 mpk | 584.678 | 143.396 | 5 |
| G000625 - 0.3 mpk | 329.386 | 72.7329 | 5 |
| G000625 - 0.1 mpk | 595.212 | 90.3979 | 5 |
| G000626 - 0.3 mpk | 328.34 | 142.975 | 5 |
| G000626 - 0.1 mpk | 649.298 | 72.829 | 5 |
| G000627 - 0.3 mpk | 443.848 | 156.222 | 5 |
| G000627 - 0.1 mpk | 692.942 | 187.783 | 5 |
| G000283 - 0.3 mpk | 315.128 | 112.059 | 5 |
| G000283 - 0.1 mpk | 535.656 | 186.657 | 5 |

[1813] FIGS. 3A and 3B show the editing efficiency and TTR protein levels, respectively, for LNPs containing the sgRNAs indicated in Tables 22A and 22B, which all target the same sequence in the TTR gene (See Table 1 for sgRNA nucleotide sequences). G000502 served as a reference comparator. The LNPs were made according to LNP Procedure C in Example 1(F). The data shown in FIGS. 3A and 3B are from mice administered 0.1 mg/kg (mpk) or 0.3 mg/kg of LNPs and are summarized in Tables 22A and 22B.

TABLE 22A

| Guide | Average Editing (%) | Std. Dev. | N |
|---|---|---|---|
| TSS | 0.133333 | 0.057735 | 3 |
| G000502 0.1 mpk | 37.4 | 12.106 | 5 |
| G000502 0.3 mpk | 64.86 | 2.62545 | 5 |
| G009571 0.1 mpk | 47.6 | 6.98665 | 4 |
| G009571 0.3 mpk | 69.8 | 1.59217 | 5 |
| G010015 0.1 mpk | 47.86 | 6.09451 | 5 |
| G010015 0.3 mpk | 69.325 | 2.20662 | 4 |

TABLE 22B

| | Average Serum | | |
|---|---|---|---|
| Guide | TTR (μg/mL) | Std. Dev. | N |
| TSS | 1844.59 | 542.644 | 5 |
| G000502 0.1 mpk | 768.714 | 390.311 | 5 |
| G000502 0.3 mpk | 169.707 | 102.03 | 5 |
| G009571 0.1 mpk | 658.269 | 303.19 | 5 |
| G009571 0.3 mpk | 84.6392 | 33.3813 | 5 |
| G010015 0.1 mpk | 602.506 | 354.455 | 5 |
| G010015 0.3 mpk | 86.236 | 38.391 | 5 |

[1814] FIGS. 4A and 4B show the editing efficiency and TTR protein levels, respectively, for LNPs containing the sgRNAs indicated in Tables 23A and 23B, which all target the same sequence in the TTR gene (See Table 1 for sgRNA nucleotide sequences). G000211 and G000282 served as reference comparators. The LNPs were made according to LNP Procedure A in Example 1(F) using IVT Cas9 mRNA corresponding to SEQ ID NO: 501. The data shown in FIGS. 4A and 4B are from mice administered 0.5 mg/kg (mpk) or 1.0 mg/kg of LNPs and are summarized in Tables 23A and 23B.

TABLE 23A

| Guide | Average Editing (%) | Std. Dev. | N |
|---|---|---|---|
| PBS | 0.08 | 0.04472 | 5 |
| G000513 - 1 mpk | 12.7 | 15.11 | 5 |
| G000513 - 0.5 mpk | 3.76 | 2.359 | 5 |
| G000514 - 1 mpk | 0.82 | 0.3271 | 5 |
| G000514 - 0.5 mpk | 0.34 | 0.08944 | 5 |
| G000515 - 1 mpk | 30.12 | 12.44 | 5 |
| G000515 - 0.5 mpk | 7.98 | 2.111 | 5 |
| G000516 - 1 mpk | 3.96 | 2.035 | 5 |
| G000516 - 0.5 mpk | 0.92 | 0.3564 | 5 |
| G000517 - 1 mpk | 0.96 | 0.2302 | 5 |
| G000517 - 0.5 mpk | 0.42 | 0.1304 | 5 |
| G000518 - 1 mpk | 0.62 | 0.1304 | 5 |
| G000518 - 0.5 mpk | 0.22 | 0.04472 | 5 |
| G000211 - 1 mpk | 2.66 | 1.346 | 5 |
| G000211 - 0.5 mpk | 0.74 | 0.1517 | 5 |
| G000282 - 1 mpk | 20.3 | 12.21 | 5 |
| G000282 - 0.5 mpk | 14.24 | 9.371 | 5 |

TABLE 23B

| Guide | Average Serum TTR (μg/mL) | Std. Dev. | N |
|---|---|---|---|
| PBS | 1386 | 147.5 | 5 |
| G000513 - 1 mpk | 880.9 | 278.6 | 5 |
| G000513 - 0.5 mpk | 1095 | 86.52 | 5 |
| G000514 - 1 mpk | 1199 | 119.3 | 5 |
| G000514 - 0.5 mpk | 1131 | 139 | 4 |
| G000515 - 1 mpk | 629 | 288 | 5 |
| G000515 - 0.5 mpk | 1173 | 170.7 | 5 |
| G000516 - 1 mpk | 1091 | 118.6 | 5 |
| G000516 - 0.5 mpk | 1416 | 174.7 | 5 |
| G000517 - 1 mpk | 1336 | 137.2 | 5 |
| G000517 - 0.5 mpk | 1321 | 181.3 | 5 |
| G000518 - 1 mpk | 1508 | 289.9 | 5 |
| G000518 - 0.5 mpk | 1267 | 376.7 | 5 |
| G000211 - 1 mpk | 1393 | 256.9 | 5 |
| G000211 - 0.5 mpk | 1318 | 223.3 | 5 |
| G000282 - 1 mpk | 929.2 | 250.4 | 5 |
| G000282 - 0.5 mpk | 1162 | 282 | 5 |

[1815] The same sgRNAs listed in Tables 23A and 23B (Table 1) were tested in vitro by transfection into Neuro2A cells, as per Example 1(C). Results are shown in FIG. 5.

[1816] FIGS. 6A and 6B show the editing efficiency and TTR protein levels, respectively, for LNPs containing the sgRNAs indicated in Tables 24A and 24B, which all target the same sequence in the TTR gene (See Table 1 for sgRNA nucleotide sequences). G000211 and G000282 served as reference comparators. The LNPs were made according to LNP Procedure B in Example 1(F). The data shown in FIGS. 6A and 6B are from mice administered 0.1 mg/kg (mpk) of LNPs and are summarized in Tables 24A and 24B.

TABLE 24A

| Guide | Average Editing (%) | SD | N |
|---|---|---|---|
| TSS | 0.12 | 0.0447214 | 5 |
| G000282 | 16.98 | 8.49453 | 5 |
| G000211 | 1.34 | 0.497996 | 5 |
| G000612 | 8.74 | 5.38266 | 5 |
| G000613 | 17.96 | 9.23488 | 5 |
| G000614 | 0.5 | 0.339116 | 5 |
| G000615 | 11.76 | 2.81034 | 5 |
| G000616 | 8.28 | 7.08428 | 5 |
| G000617 | 5.08 | 1.96647 | 5 |
| G000618 | 6.7 | 1.81934 | 5 |
| G000619 | 10.32 | 11.9485 | 5 |
| G000642 | 16.34 | 6.9877 | 5 |
| G000643 | 18.62 | 5.83841 | 5 |

TABLE 24B

| Guide | Average Serum TTR (μg/mL) | SD | N |
|---|---|---|---|
| TSS | 962.636 | 271.526 | 5 |
| G000282 | 936.624 | 190.211 | 5 |
| G000211 | 1239.13 | 179.194 | 5 |
| G000612 | 1011.85 | 215.796 | 5 |
| G000613 | 810.72 | 156.082 | 5 |
| G000614 | 1150.81 | 362.492 | 5 |
| G000615 | 1007.04 | 179.37 | 5 |
| G000616 | 879.592 | 180.917 | 5 |
| G000617 | 1031.62 | 184.594 | 5 |
| G000618 | 921.65 | 71.1735 | 5 |
| G000619 | 924.728 | 348.938 | 5 |
| G000642 | 692.038 | 162.344 | 5 |
| G000643 | 696.416 | 51.8907 | 5 |

[1817] FIGS. 7A and 7B show the editing efficiency and TTR protein levels, respectively, for LNPs containing the sgRNAs indicated in Tables 25A and 25B, which all target the same sequence in the TTR gene (See Table 1 for sgRNA nucleotide sequences). G000534 served as a reference comparator. The LNPs were made according to LNP Procedure C in Example 1(F). The data shown in FIGS. 7A and 7B are from rats administered 0.3 mg/kg (mpk) of LNPs and are summarized in Tables 25A and 25B.

TABLE 25A

| Guide | Average Editing (%) | SD | N |
|---|---|---|---|
| TSS | 0.02 | 0.0447214 | 5 |
| G000534 | 20.26 | 4.73477 | 5 |
| G000637 | 11.66 | 5.93827 | 5 |
| G000694 | 20.8 | 5.62894 | 5 |
| G000695 | 11.28 | 5.66719 | 5 |

TABLE 25B

| Guide | Average Serum TTR (μg/mL) | SD | N |
|---|---|---|---|
| TSS | 983.078 | 138.405 | 5 |
| G000534 | 1008.92 | 220.498 | 5 |
| G000637 | 1027.73 | 199.071 | 5 |
| G000694 | 682.964 | 163.519 | 5 |
| G000695 | 889.5 | 270.242 | 5 |

[1818] FIGS. 8A and 8B show the editing efficiency and TTR protein levels, respectively, for LNPs containing the sgRNAs indicated in Tables 26A and 26B, which all target the same sequence in the TTR gene (See Table 1 for sgRNA nucleotide sequences). G000534 served as a reference comparator. The LNPs were made according to LNP Procedure C in Example 1(F). The data shown in FIGS. 8A and 8B are from rats administered 0.3 mg/kg (mpk) and 1.0 mg/kg of LNPs and are summarized in Tables 26A and 26B.

TABLE 26A

| Guide | Average Editing (%) | SD | N |
|---|---|---|---|
| TSS | 0.02 | 0.0447214 | 5 |
| G000534 - 1 MPK | 53.48 | 4.34879 | 5 |
| G000534 - 0.3 MPK | 19 | 2.96395 | 5 |
| G000694 - 1 MPK | 39.32 | 6.93087 | 5 |
| G000694 - 0.3 MPK | 13.46 | 5.50391 | 5 |

TABLE 26B

| Guide | Average Serum TTR (μg/mL) | SD | N |
|---|---|---|---|
| TSS | 1178.71 | 75.8721 | 5 |
| G000534 - 1 MPK | 266.136 | 63.6724 | 5 |
| G000534 - 0.3 MPK | 676.446 | 107.07 | 5 |
| G000694 - 1 MPK | 503.888 | 30.8714 | 5 |
| G000694 - 0.3 MPK | 789.686 | 91.9034 | 5 |

### Example 11—In Vivo Studies of sgRNAs

[1819] LNPs prepared as described above in Example 1(F) (LNP Procedure D), comprising chemically synthesized sgRNAs targeting the mouse TTR gene and IVT Cas9 mRNA in a 1:1 weight ratio, were administered to CD-1 female mice (N indicated below) as described above in Example 1(E). Eight days post dose at necropsy, livers and blood were collected for NGS measurements of editing efficiency and serum TTR analysis, respectively, as described above in Example 1. Animals were weighed 24 hours post dose for overall wellness assessment.

[1820] FIGS. 17A and 17B show the editing efficiency and TTR protein levels, respectively, for LNPs containing G282, G9981-G9986, and G10009, which all have the same nucleotide sequence as G282. The data shown in FIGS. 17A and 17B are from mice administered 0.1 mg/kg of LNPs, and are summarized in Tables 27A and 27B.

TABLE 27A

| Guide ID | Average % Editing | Std. Dev. | N |
|---|---|---|---|
| TSS | 0.1 | 0 | 5 |
| G000282 | 18.12 | 3.27826 | 5 |
| G009981 | 9.84 | 3.01297 | 5 |
| G009982 | 12.94 | 3.3709 | 5 |
| G009983 | 14.08 | 6.19007 | 5 |
| G009984 | 13.62 | 11.0981 | 5 |
| G009985 | 37.9 | 12.406 | 5 |
| G009986 | 11.9 | 9.25122 | 5 |
| G010009 | 36.14 | 10.7162 | 5 |

TABLE 27B

| Guide ID | Serum TTR (μg/mL) | Std. Dev. | N |
|---|---|---|---|
| TSS | 1002.47 | 185.909 | 5 |
| G000282 | 727.622 | 126.773 | 5 |
| G009981 | 764.096 | 147.486 | 5 |
| G009982 | 768.886 | 246.038 | 5 |
| G009983 | 733.138 | 119.212 | 5 |
| G009984 | 724.15 | 210.047 | 5 |
| G009985 | 353.746 | 277.917 | 5 |
| G009986 | 694.538 | 206.566 | 5 |
| G010009 | 542.53 | 138.99 | 5 |

[1821] FIGS. 18A and 18B show the editing efficiency and TTR protein levels, respectively, for LNPs containing G502 and G10011-G10016, which all have the same nucleotide sequence as G502. The data shown in FIGS. 18A and 18B are from mice administered 0.1 mg/kg of LNPs, and are summarized in Tables 28A and 28B.

TABLE 28A

| Guide ID | Average % Editing | Std. Dev. | N |
|---|---|---|---|
| TSS | 0.1 | 0 | 5 |
| G000502 | 31.58 | 7.40993 | 5 |
| G010011 | 13.44 | 4.90184 | 5 |
| G010012 | 28.42 | 2.98613 | 5 |
| G010013 | 20 | 3.83536 | 5 |
| G010014 | 9.12 | 4.75994 | 5 |
| G010015 | 48.08 | 6.12552 | 5 |
| G010016 | 22.92 | 4.32169 | 5 |

TABLE 28B

| Guide ID | Serum TTR (μg/ML) | Std. Dev. | N |
|---|---|---|---|
| TSS | 931.178 | 141.193 | 5 |
| G000502 | 570.332 | 179.698 | 5 |
| G010011 | 589.487 | 31.5553 | 4 |
| G010012 | 454.848 | 99.7835 | 5 |
| G010013 | 597.594 | 314.78 | 5 |
| G010014 | 381.214 | 169.623 | 5 |
| G010015 | 181.184 | 54.3217 | 5 |
| G010016 | 317.66 | 203.218 | 5 |

[1822] FIGS. 19A and 19B show the editing efficiency and TTR protein levels, respectively, for LNPs containing G502 and G9965-G9976, which all have the same nucleotide sequence as G502. The data shown in FIGS. 19A and 19B are from mice administered 0.1 mg/kg of LNPs, and are summarized in Tables 29A and 29B.

TABLE 29A

| Guide ID | Average % Editing | Std. Dev. | N |
|---|---|---|---|
| TSS | 0.6 | 0.0816497 | 4 |
| G000502 | 39.18 | 9.50616 | 5 |
| G009565 | 18.32 | 2.58592 | 5 |
| G009566 | 18 | 10.5654 | 4 |
| G009567 | 52.22 | 5.29641 | 5 |
| G009568 | 42.64 | 12.5763 | 5 |
| G009569 | 44.525 | 15.3743 | 4 |
| G009570 | 46.52 | 9.6699 | 5 |
| G009571 | 52.58 | 14.8569 | 5 |
| G009572 | 10.18 | 4.80749 | 5 |
| G009573 | 48.04 | 8.35063 | 5 |
| G009574 | 28.1 | 3.80592 | 5 |
| G009575 | 40.26 | 10.7549 | 5 |
| G009576 | 15.36 | 6.01731 | 5 |

TABLE 29B

| Guide ID | Serum TTR (μg/mL) | Std. Dev. | N |
|---|---|---|---|
| TSS | 1992.98 | 364.252 | 5 |
| G000502 | 594.954 | 199.578 | 5 |
| G009565 | 1024.87 | 681.864 | 5 |
| G009566 | 1120.52 | 361.314 | 4 |
| G009567 | 378.082 | 108.791 | 5 |
| G009568 | 613.27 | 290.386 | 5 |
| G009569 | 312.825 | 324.585 | 4 |
| G009570 | 410.94 | 175.285 | 5 |
| G009571 | 365.506 | 365.327 | 5 |
| G009572 | 1267.14 | 295.1 | 5 |
| G009573 | 564.246 | 53.4768 | 5 |
| G009574 | 685.998 | 178.199 | 5 |
| G009575 | 664.69 | 507.897 | 5 |
| G009576 | 1087.78 | 325.185 | 5 |

[1823] FIGS. 19C and 19D show the editing efficiency and TTR protein levels, respectively, for LNPs containing G282 and G9553-G9564, which all have the same nucleotide sequence as G282. The data shown in FIGS. 19C and 19D are from mice administered 0.1 mg/kg of LNPs, and are summarized in Tables 30A and 30B.

TABLE 30A

| Guide ID | Average % Editing | Std. Dev. | N |
|---|---|---|---|
| TSS | 0.1 | 0 | 5 |
| G000282 | 37.56 | 8.50194 | 5 |
| G009553 | 7.35 | 2.93201 | 4 |
| G009554 | 9.85 | 5.35257 | 4 |
| G009555 | 54 | 10.5376 | 5 |
| G009556 | 20.72 | 5.53281 | 5 |
| G009557 | 30.86 | 5.2491 | 5 |
| G009558 | 26.5 | 14.046 | 5 |
| G009559 | 52 | 8.22283 | 5 |
| G009560 | 9.82 | 7.95217 | 5 |
| G009561 | 33.62 | 5.01568 | 5 |
| G009562 | 21.8 | 7.32427 | 5 |
| G009563 | 28.5 | 4.48497 | 5 |
| G009564 | 8.3 | 6.59735 | 5 |

TABLE 30B

| Guide ID | Serum TTR (μg/mL) | Std. Dev. | N |
|---|---|---|---|
| TSS | 609.04 | 85.4341 | 5 |
| G000282 | 341.19 | 111.876 | 5 |
| G009553 | 704.38 | 55.5751 | 4 |
| G009554 | 578.958 | 222.003 | 5 |
| G009555 | 271.606 | 212.904 | 5 |
| G009556 | 656.606 | 176.012 | 5 |
| G009557 | 549.578 | 346.277 | 5 |
| G009558 | 820.098 | 368.242 | 5 |
| G009559 | 402.612 | 270.913 | 5 |
| G009560 | 1050.99 | 211.752 | 5 |
| G009561 | 546.352 | 134.462 | 5 |
| G009562 | 771.896 | 268.971 | 5 |
| G009563 | 703.896 | 345.506 | 5 |
| G009564 | 702.558 | 158.096 | 5 |

[1824] FIGS. 20A and 20B show the editing efficiency and TTR protein levels, respectively, for LNPs containing G502, G9567, G9569, and G9570, which all have the same nucleotide sequence as G502. The data shown in FIGS. 20A and 20B are from mice administered 0.03 mg/kg, 0.1 mg/kg, or 0.3 mg/kg of LNPs, and are summarized in Tables 31A and 31B.

TABLE 31A

| Guide ID | Average % Editing | Std. Dev. | N |
|---|---|---|---|
| TSS | 0.26 | 0.250998 | 5 |
| G000502 0.3 mpk | 73.26 | 1.61802 | 5 |
| G000502 0.1 mpk | 47.1 | 10.0135 | 5 |
| G000502 0.03 mpk | 15.02 | 9.31649 | 5 |
| G009567 0.3 mpk | 72.5 | 3.06105 | 5 |
| G009567 0.1 mpk | 54.86 | 7.43525 | 5 |
| G009567 0.03 mpk | 21.7 | 7.22565 | 5 |
| G009569 0.3 mpk | 71.7 | 2.60576 | 5 |
| G009569 0.1 mpk | 56.42 | 8.42033 | 5 |
| G009569 0.03 mpk | 23.42 | 4.62136 | 5 |
| G009570 0.3 mpk | 68.1 | 3.99166 | 4 |
| G009570 0.1 mpk | 51.08 | 11.5764 | 5 |
| G009570 0.03 mpk | 20.38 | 8.62827 | 5 |

TABLE 31B

| Guide ID | Serum TTR (μg/mL) | Std. Dev. | N |
|---|---|---|---|
| TSS | 858.846 | 34.7566 | 5 |
| G000502 0.3 mpk | 31.962 | 36.7047 | 5 |
| G000502 0.1 mpk | 382.614 | 113.613 | 5 |
| G000502 0.03 mpk | 686.612 | 96.3004 | 5 |
| G009567 0.3 mpk | 20.1267 | 13.6911 | 3 |
| G009567 0.1 mpk | 230.032 | 64.7601 | 5 |
| G009567 0.03 mpk | 620.4 | 130.126 | 5 |
| G009569 0.3 mpk | 25.91 | 11.9748 | 4 |
| G009569 0.1 mpk | 231.09 | 102.557 | 5 |
| G009569 0.03 mpk | 582.208 | 124.496 | 5 |
| G009570 0.3 mpk | 73.82 | 13.3713 | 5 |
| G009570 0.1 mpk | 334.308 | 163.522 | 5 |
| G009570 0.03 mpk | 661.48 | 171.449 | 5 |

[1825] FIGS. 20C and 20D show the editing efficiency and TTR protein levels, respectively, for LNPs containing G502, G9571, and G10039, which all have the same nucleotide sequence as G502. The data shown in FIGS. 20C and 20D are from mice administered 0.03 mg/kg, 0.1 mg/kg, or 0.3 mg/kg of LNPs, and are summarized in Tables 32A and 32B.

TABLE 32A

| Guide ID | Average % Editing | Std. Dev. | N |
|---|---|---|---|
| TSS | 0.08 | 0.0447214 | 5 |
| G000502 0.3 mpk | 50.7 | 23.7015 | 5 |
| G000502 0.1 mpk | 38.2 | 3.14245 | 5 |
| G000502 0.03 mpk | 12.78 | 8.84064 | 5 |
| G0009571 0.3 mpk | 72.24 | 2.21653 | 5 |
| G0009571 0.1 mpk | 56.48 | 6.50092 | 5 |
| G0009571 0.03 mpk | 15.6 | 5.6 | 5 |
| G010039 0.3 mpk | 65.98 | 4.22694 | 5 |
| G010039 0.1 mpk | 31.74 | 10.0179 | 5 |
| G010039 0.03 mpk | 13.34 | 6.50446 | 5 |

TABLE 32B

| Guide ID | Serum TTR (μg/mL) | Std. Dev. | N |
|---|---|---|---|
| TSS | 1062.23 | 240.945 | 5 |
| G000502 0.3 mpk | 224.37 | 242.604 | 4 |
| G000502 0.1 mpk | 814.642 | 264.733 | 5 |
| G000502 0.03 mpk | 922.306 | 235.495 | 5 |
| G0009571 0.3 mpk | 123.52 | 43.2127 | 4 |
| G0009571 0.1 mpk | 317.752 | 100.059 | 5 |
| G0009571 0.03 mpk | 860.7 | 114.188 | 5 |
| G010039 0.3 mpk | 160.613 | 83.6036 | 4 |
| G010039 0.1 mpk | 662.048 | 274.764 | 5 |
| G010039 0.03 mpk | 759.892 | 166.829 | 5 |

[1826] FIGS. 20E and 20F show the editing efficiency and TTR protein levels, respectively, for LNPs containing G502, G9571, and G10015, which all have the same nucleotide sequence as G502. The data shown in FIGS. 20E and 20F are from mice administered 0.1 mg/kg or 0.3 mg/kg of LNPs, and are summarized in Tables 33A and 33B.

TABLE 33A

| Guide ID | Average Editing (%) | Std. Dev. | N |
|---|---|---|---|
| TSS | 0.133333 | 0.057735 | 3 |
| G000502 0.1 mpk | 37.4 | 12.106 | 5 |
| G000502 0.3 mpk | 64.86 | 2.62545 | 5 |
| G009571 0.1 mpk | 47.6 | 6.98665 | 4 |
| G009571 0.3 mpk | 69.8 | 1.59217 | 5 |
| G010015 0.1 mpk | 47.86 | 6.09451 | 5 |
| G010015 0.3 mpk | 69.325 | 2.20662 | 4 |

TABLE 33B

| Guide ID | Serum TTR (μg/mL) | Std. Dev. | N |
|---|---|---|---|
| TSS | 1844.59 | 542.644 | 5 |
| G000502 0.1 mpk | 768.714 | 390.311 | 5 |
| G000502 0.3 mpk | 169.707 | 102.03 | 5 |
| G009571 0.1 mpk | 658.269 | 303.19 | 5 |
| G009571 0.3 mpk | 84.6392 | 33.3813 | 5 |
| G010015 0.1 mpk | 602.506 | 354.455 | 5 |
| G010015 0.3 mpk | 86.236 | 38.391 | 5 |

### Example 12—In Vivo Studies

[1827] FIGS. 8C and 8D show the editing efficiency and TTR protein levels, respectively, for LNPs containing the sgRNAs indicated in Table 34 (See Table 1 for sgRNA nucleotide sequences) which all target the same sequence in the TTR gene. G000282 served as a reference comparator. The LNPs were made according to LNP Procedure D in Example 1(F). The data shown in FIGS. 8C and 8D are from CD-1 mice administered 0.1 mg/kg and 0.3 mg/kg of total RNA and are summarized in Table 34.

TABLE 34
Liver Editing and Serum TTR

| | | | | | Serum | | | Serum |
|---|---|---|---|---|---|---|---|---|
| | Dose | % | | | TTR | | | TTR |
| Guide | (mpk) | Editing | SD | N | (μg/ml) | SD | N | % TSS |
| TSS | TSS | 4.8 | 1.8 | 5 | 746 | 259 | 5 | 100% |
| G000282 | 0.1 | 50.8 | 4.1 | 5 | 173 | 46 | 5 | 23% |
| G000282 | 0.3 | 64.9 | 1.9 | 5 | 55 | 51 | 5 | 7% |
| G000639 | 0.1 | 43.3 | 7.6 | 4 | 246 | 82 | 4 | 33% |
| G000639 | 0.3 | 63.4 | 5.1 | 5 | 104 | 85 | 5 | 14% |
| G000640 | 0.1 | 42.7 | 8.4 | 4 | 260 | 70 | 4 | 35% |
| G000640 | 0.3 | 65.4 | 1.1 | 4 | 55 | 19 | 4 | 7% |
| G011771 | 0.1 | 49.3 | 7.7 | 5 | 205 | 82 | 5 | 27% |
| G011771 | 0.3 | 66.4 | 4.3 | 5 | 38 | 15 | 5 | 5% |

[1828] FIGS. 21A and 21B show the editing efficiency and TTR protein levels, respectively, for LNPs containing the sgRNAs indicated in Table 35 (See Table 1 for sgRNA nucleotide sequences) which all target the same sequence in the TTR gene. The LNPs were made according to LNP Procedure D in Example 1(F). The data shown in FIGS. 21A and 21B are from CD-1 female mice (n=5) administered 0.1 mg/kg and 0.3 mg/kg of total RNA and are summarized in Table 35.

TABLE 35
Liver Editing and Serum TTR

| | | | | Serum | | Serum |
|---|---|---|---|---|---|---|
| | Dose | % | | TTR | | TTR |
| Guide | (mpk) | Editing | SD | μg/ml | SD | % TSS |
| TSS | TSS | 0.1 | 0.0 | 1845 | 543 | 100% |
| G000502 | 0.1 | 37.4 | 12.1 | 769 | 390 | 42% |
| G000502 | 0.3 | 64.9 | 2.6 | 170 | 102 | 9% |
| G009571 | 0.1 | 49.5 | 7.3 | 658 | 303 | 36% |
| G009571 | 0.3 | 69.8 | 1.6 | 85 | 33 | 5% |
| G010015 | 0.1 | 47.9 | 6.1 | 603 | 354 | 33% |
| G010015 | 0.3 | 69.1 | 2.0 | 86 | 38 | 5% |
| G012401 | 0.1 | 28.2 | 10.0 | 1183 | 298 | 64% |
| G012401 | 0.3 | 59.0 | 7.7 | 264 | 127 | 14% |
| G012402 | 0.1 | 45.7 | 4.6 | 872 | 293 | 47% |
| G012402 | 0.3 | 67.8 | 3.8 | 117 | 64 | 6% |

[1829] FIGS. 18C-D show the editing efficiency and TTR protein levels, respectively, for LNPs containing the sgRNAs indicated in Table 36 (See Table 1 for sgRNA nucleotide sequences) which all target the same sequence in the TTR gene. The LNPs were made according to LNP Procedure D in Example 1(F). The data shown in FIGS. 18C-D are from CD-1 female mice administered 0.1 mg/kg (mpk) and 0.3 mg/kg of total RNA and are summarized in Table 36.

TABLE 36
Liver Editing and Serum TTR

| | | | | Serum | | | Serum |
|---|---|---|---|---|---|---|---|
| | Dose | % | | TTR | | | TTR |
| Guide | (mpk) | Editing | SD | (ug/ml) | SD | N | % TSS |
| TSS | TSS | 0.4 | 0.6 | 1935 | 443 | 5 | 100% |
| G000282 | 0.1 | 40.2 | 13.5 | 174 | 94 | 5 | 9% |
| G000282 | 0.3 | 67.9 | 0.9 | 351 | 54 | 5 | 18% |
| G009559 | 0.1 | 49.6 | 6.2 | 132 | 73 | 5 | 7% |
| G009559 | 0.3 | 61.0 | 15.8 | 165 | 32 | 5 | 9% |
| G009985 | 0.1 | 45.5 | 3.8 | 143 | 42 | 5 | 7% |
| G009985 | 0.3 | 65.6 | 5.1 | 232 | 71 | 5 | 12% |
| G010009 | 0.1 | 60.5 | 6.4 | 58 | 40 | 5 | 3% |
| G010009 | 0.3 | 58.2 | 18.6 | 159 | 77 | 4 | 8% |

[1830] FIGS. 18E-F show the editing efficiency and TTR protein levels, respectively, for LNPs containing the sgRNAs indicated in Table 37 (See Table 1 for sgRNA nucleotide sequences) which all target the same sequence in the TTR gene. The LNPs were made according to LNP Procedure D in Example 1(F). The data shown in FIGS. 18E-F are from CD-1 female mice (n=5) administered 0.1 mg/kg (mpk) and 0.3 mg/kg of total RNA and are summarized in Table 37.

TABLE 37
Liver Editing and Serum TTR

| | | | | Serum | | Serum |
|---|---|---|---|---|---|---|
| | Dose | % | | TTR | | TTR |
| Guide | (mpk) | Editing | SD | (ug/ml) | SD | % TSS |
| TSS | TSS | 0.1 | 0.0 | 666 | 103 | 100% |
| G000502 | 0.1 | 46.9 | 8.1 | 199 | 52 | 30% |
| G000502 | 0.3 | 66.3 | 1.7 | 51 | 12 | 8% |
| G010018 | 0.1 | 42.5 | 7.8 | 211 | 38 | 32% |
| G010018 | 0.3 | 69.6 | 1.7 | 36 | 20 | 5% |
| G010022 | 0.1 | 45.0 | 12.8 | 290 | 131 | 44% |
| G010022 | 0.3 | 70.4 | 1.4 | 20 | 13 | 3% |
| G010024 | 0.1 | 44.0 | 7.9 | 235 | 95 | 35% |
| G010024 | 0.3 | 71.2 | 1.4 | 14 | 6 | 2% |
| G010038 | 0.1 | 34.4 | 9.6 | 291 | 96 | 44% |
| G010038 | 0.3 | 64.6 | 2.7 | 63 | 27 | 9% |

[1831] FIGS. 3C-D show the editing efficiency and TTR protein levels, respectively, for LNPs containing the sgRNAs indicated in Table 38 (See Table 1 for sgRNA nucleotide sequences) which all target the same sequence in the TTR gene. The LNPs were made according to LNP Procedure D in Example 1(F). The data shown in FIGS. 3C-D are from CD-1 female mice (n=5) administered 0.1 mg/kg (mpk) and 0.3 mg/kg of total RNA and are summarized in Table 38.

TABLE 38
Liver Editing and Serum TTR

| | | | | Serum | | Serum |
|---|---|---|---|---|---|---|
| | Dose | % | | TTR | | TTR |
| Guide | (mpk) | Editing | SD | ug/ml | SD | % TSS |
| TSS | TSS | 0.1 | 0.0 | 1035 | 100 | 100% |
| G000282 | 0.1 | 35.3 | 7.7 | 494 | 103 | 48% |
| G000282 | 0.3 | 62.9 | 2.6 | 95 | 27 | 9% |
| G000639 | 0.1 | 28.0 | 1.1 | 597 | 144 | 58% |
| G000639 | 0.3 | 57.7 | 5.0 | 157 | 35 | 15% |
| G012741 | 0.1 | 37.2 | 14.6 | 420 | 167 | 41% |
| G012741 | 0.3 | 58.6 | 3.8 | 147 | 30 | 14% |

[1832] FIGS. 22A-B show the editing efficiency and TTR protein levels, respectively, for LNPs containing the sgRNAs indicated in Table 39 (See Table 1 for sgRNA nucleotide sequences) which all target the same sequence in the TTR gene. The LNPs were made according to LNP Procedure P4.3 in Example 1(F). The data shown in FIGS. 22A-B are from Sprague Dawley rats administered 0.1 mg/kg and 0.03 mg/kg of total RNA and are summarized in Table 39.

TABLE 39
Liver Editing and Serum TTR in rat

| | | | | Serum | | | Serum |
|---|---|---|---|---|---|---|---|
| | Dose | % | | TTR | | | TTR |
| Guide | (mpk) | Editing | SD | (ug/ml) | SD | N | % TSS |
| TSS | TSS | 0.2 | 0.1 | 1239 | 195 | 5 | 100% |
| G000534 | 0.03 | 12.4 | 3.0 | 1195 | 230 | 5 | 96% |
| G000534 | 0.10 | 46.6 | 0.77 | 450 | 94 | 5 | 36% |
| G013496 | 0.03 | 9.9 | 1.3 | 1028 | 300 | 5 | 83% |
| G013496 | 0.10 | 47.6 | 6.2 | 471 | 116 | 5 | 38% |
| G013771 | 0.03 | 18.7 | 2.7 | 1006 | 147 | 5 | 81% |
| G013771 | 0.10 | 58.0 | 9.1 | 331 | 150 | 4 | 27% |

[1833] Table 40 shows the editing efficiency and TTR protein levels, respectively, for LNPs containing the indicated sgRNAs (See Table 1 for sgRNA nucleotide sequences) which all target the same sequence in the TTR gene. The LNPs were made according to LNP Procedure D in Example 1(F). The data shown in Table 40 are from CD-1 female mice administered 0.1 mg/kg of total RNA.

TABLE 40
Liver Editing and Serum TTR

| | | | | Serum | | | Serum |
|---|---|---|---|---|---|---|---|
| | | | | TTR | | | TTR |
| Guide | Editing | SD | N | (μg/ml) | SD | N | % TSS |
| TSS | 0.3 | 0.1 | 5 | 759 | 106 | 5 | 100% |
| G000502 | 26.7 | 6.4 | 5 | 480 | 148 | 5 | 63% |
| G012421 | 17.2 | 4.9 | 5 | 642 | 137 | 5 | 85% |
| G012422 | 33.5 | 9.5 | 5 | 479 | 170 | 5 | 63% |
| G012423 | 12.4 | 2.7 | 5 | 626 | 82 | 5 | 82% |
| G012424 | 18.4 | 6.1 | 5 | 614 | 106 | 5 | 81% |
| G012426 | 31.4 | 4.8 | 5 | 481 | 122 | 5 | 63% |
| G012443 | 36.6 | 10.5 | 4 | 406 | 115 | 4 | 53% |
| G012448 | 37.6 | 6.6 | 5 | 400 | 194 | 5 | 53% |
| G012453 | 16.5 | 4.0 | 5 | 644 | 126 | 5 | 85% |
| G012456 | 3.6 | 1.3 | 5 | 795 | 89 | 5 | 105% |
| G012457 | 14.8 | 5.5 | 5 | 675 | 167 | 5 | 89% |

[1834] FIGS. 24A-B show the editing efficiency and TTR protein levels, respectively, for LNPs containing the sgRNAs indicated in Table 41 (See Table 1 for sgRNA nucleotide sequences) which all target the same sequence in the TTR gene. The LNPs were made according to LNP Procedure D in Example 1(F). The data shown in FIGS. 24A-B are from CD-1 female mice administered 0.1 mg/kg of total RNA and are summarized in Table 41.

TABLE 41
Liver Editing and Serum TTR

| | | | | Serum | | | Serum |
|---|---|---|---|---|---|---|---|
| | % | | | TTR | | | TTR |
| Guide | Editing | SD | N | (μg/ml) | SD | N | % TSS |
| TSS | 0.1 | 0.1 | 5 | 763 | 66 | 5 | 100% |
| G000502 | 22.9 | 8.5 | 5 | 610 | 196 | 5 | 80% |
| G012973 | 0.1 | 0.1 | 5 | 818 | 47 | 5 | 107% |
| G012974 | 0.5 | 0.2 | 5 | 949 | 140 | 5 | 124% |
| G012975 | 6.6 | 3.0 | 5 | 787 | 190 | 5 | 103% |
| G012976 | 0.2 | 0.1 | 5 | 671 | 71 | 5 | 88% |
| G012977 | 3.0 | 1.6 | 5 | 636 | 65 | 5 | 83% |
| G012978 | 19.3 | 9.2 | 5 | 559 | 128 | 5 | 73% |
| G012979 | 1.0 | 0.8 | 5 | 1234 | 206 | 5 | 162% |
| CR012980 | 0.2 | 0.2 | 4 | 837 | 223 | 5 | 110% |

[1835] FIGS. 3E-F show the editing efficiency and TTR protein levels, respectively, for LNPs containing the sgRNAs indicated in Table 42 (See Table 1 for sgRNA nucleotide sequences) which all target the same sequence in the TTR gene. The LNPs were made according to LNP Procedure D in Example 1(F). The data shown in FIGS. 3E-F are from Sprague Dawley female rats (n=5) administered 0.1 mg/kg and 0.03 mg/kg of total RNA and are summarized in Table 42.

TABLE 42
Liver editing & Serum TTR in Rat

| | | | | Serum | | Serum |
|---|---|---|---|---|---|---|
| | Dose | % | | TTR | | TTR |
| Guide | (mpk) | Editing | SD | ug/ml | SD | % TSS |
| TSS | TSS | 0.1 | 0.0 | 1635 | 301 | 100% |
| G013498 | 0.03 | 13.7 | 5.9 | 1054 | 225 | 64% |
| G013498 | 0.10 | 51.0 | 9.1 | 325 | 133 | 20% |
| G000534 | 0.03 | 10.7 | 1.1 | 1105 | 154 | 68% |
| G000534 | 0.10 | 38.6 | 13.1 | 411 | 90 | 25% |
| G000694 | 0.03 | 3.1 | 1.0 | 1157 | 223 | 71% |
| G000694 | 0.10 | 28.2 | 6.1 | 656 | 92 | 40% |

### Example 13—Correlations between In Vitro and In Vivo Editing with sgRNAs

[1836] Chemically synthesized sgRNAs (G502 and G9565-G9576) and IVT Cas9 mRNA were administered to primary hepatocytes as lipoplex transfections or LNP transfections as described in Example 1(D) and 1(F) (LNP Procedure D), respectively. Editing of the TTR gene was determined by NGS as described above in Example 1(G). The same sgRNAs were also administered to CD-1 female mice as described in Example 5, particularly the section describing data shown in FIGS. 19A and 19B.

[1837] The % editing from in vitro lipoplex transfections of PMH compared to in vivo editing is shown FIG. 16A. As shown in FIG. 16A, the correlation between in vitro lipoplex transfections of PMH and in vivo editing is not statistically significant. The correlation is not predictive.

[1838] The % editing from in vitro LNP transfections of PMH (at 0.3 ng, 1 ng, 3 ng, 10 ng, and 30 ng) compared to in vivo editing are shown in FIGS. 16B to 16F. As shown in FIGS. 16B to 16F, the correlation between in vitro LNP transfections of PMH and in vivo editing was statistically significant. The correlation is predictive.

[1839] FIG. 16G shows a comparison of % editing with the indicated guides delivered to PMH by lipoplex transfection (data above left box), to PMH in LNP (data above center box), or to mice in vivo (data above right box). FIG. 16H shows a comparison of % editing with the indicated guides delivered to PMH in LNP (1 ng, 3 ng, 10 ng) or to mice in vivo (0.1 mpk, 0.3 mpk). Although the rank order of the indicated guides may generally be considered to be the same in each set of data, the in vivo editing shows greater differentiation of the editing results.

[1840] FIG. 16I shows the results from FIG. 16G replotted to indicate differences in editing between G000282 and G000211. The barplot values were generated by dividing % editing of the G000282 value by the % editing of the G000211 value to indicate fold differences in editing. The indicated guides were delivered to PMH by lipoplex transfection (data above left box), to PMH in LNP (data above center box), or to mice in vivo (data above right box).

[1841] FIG. 16J shows the results from FIG. 16H replotted to indicate differences in editing between G000283 and G000269. The barplot values were generated by dividing % editing of the G000283 value by the % editing of the G000269 value to indicate fold differences in editing. The indicated guides were delivered to PMH in LNP (data above left box) or to mice in vivo (data above right box).

LENGTHY TABLES
The patent application contains a lengthy table section. A copy of the table is available in electronic form from the USPTO web site (https://seqdata.uspto.gov/?pageRequest=docDetail&DocID=US20210087568A1). An electronic copy of the table will also be available from the USPTO upon request and payment of the fee set forth in 37 CFR 1.19(b)(3).

The application's sequence listing, which the Patent Office published only in electronic form, follows.

SEQUENCE LISTING (3552 sequences)

SEQ ID NO: 1 - RNA, 100 nt, Artificial Sequence
  Synthetic
uuacagccacgucuacagcaguuuuagagcuagaaauagcaaguuaaaauaaggcuaguccguuaucaacuugaaaaaguggcaccgagucggugcuuuu

SEQ ID NO: 2 - RNA, 88 nt, Artificial Sequence
  Synthetic
uuacagccacgucuacagcaguuuuagagcuagaaauagcaaguuaaaauaaggcuaguccguuaucaacuuggcaccgagucggugc

SEQ ID NO: 3 - RNA, 91 nt, Artificial Sequence
  Synthetic
uuacagccacgucuacagcaguuuuagagcuagaaauagcaaguuaaaauaaggcuaguccguuaucaacuuggcaccgagucggugcuuu

SEQ ID NO: 4 - RNA, 88 nt, Artificial Sequence; identical to SEQ ID NO: 2
  Synthetic

SEQ ID NO: 5 - RNA, 88 nt, Artificial Sequence; identical to SEQ ID NO: 2
  Synthetic

SEQ ID NO: 6 - RNA, 88 nt, Artificial Sequence; identical to SEQ ID NO: 2
  Synthetic

SEQ ID NO: 7 - RNA, 88 nt, Artificial Sequence; identical to SEQ ID NO: 2
  Synthetic

SEQ ID NO: 8 - RNA, 89 nt, Artificial Sequence
  Synthetic
uuacagccacgucuacagcaguuuuagagcuagaaauagcaaguuaaaauaaggcuaguccguuaucaacuuggcaccgagucggugcu

SEQ ID NO: 9 - RNA, 100 nt, Artificial Sequence; identical to SEQ ID NO: 1
  Synthetic

SEQ ID NO: 10 - RNA, 100 nt, Artificial Sequence
  Synthetic
cccauacuccuacagcaccaguuuuagagcuagaaauagcaaguuaaaauaaggcuaguccguuaucaacuugaaaaaguggcaccgagucggugcuuuu

SEQ ID NO: 11 - RNA, 88 nt, Artificial Sequence
  Synthetic
cccauacuccuacagcaccaguuuuagagcuagaaauagcaaguuaaaauaaggcuaguccguuaucaacuuggcaccgagucggugc

SEQ ID NO: 12 - RNA, 91 nt, Artificial Sequence
  Synthetic
cccauacuccuacagcaccaguuuuagagcuagaaauagcaaguuaaaauaaggcuaguccguuaucaacuuggcaccgagucggugcuuu

SEQ ID NO: 13 - RNA, 88 nt, Artificial Sequence; identical to SEQ ID NO: 11
  Synthetic

SEQ ID NO: 14 - RNA, 88 nt, Artificial Sequence; identical to SEQ ID NO: 11
  Synthetic

SEQ ID NO: 15 - RNA, 88 nt, Artificial Sequence; identical to SEQ ID NO: 11
  Synthetic

SEQ ID NO: 16 - RNA, 88 nt, Artificial Sequence; identical to SEQ ID NO: 11
  Synthetic

SEQ ID NO: 17 - RNA, 89 nt, Artificial Sequence
  Synthetic
cccauacuccuacagcaccaguuuuagagcuagaaauagcaaguuaaaauaaggcuaguccguuaucaacuuggcaccgagucggugcu

SEQ ID NO: 18 - RNA, 100 nt, Artificial Sequence; identical to SEQ ID NO: 10
  Synthetic

SEQ ID NO: 19 - RNA, 88 nt, Artificial Sequence
  Synthetic
cagggcucuugaagaucuccguuuuagagcuagaaauagcaaguuaaaauaaggcuaguccguuaucaacuuggcaccgagucggugc

SEQ ID NO: 20 - RNA, 91 nt, Artificial Sequence
  Synthetic
cagggcucuugaagaucuccguuuuagagcuagaaauagcaaguuaaaauaaggcuaguccguuaucaacuuggcaccgagucggugcuuu

SEQ ID NO: 21 - RNA, 88 nt, Artificial Sequence; identical to SEQ ID NO: 19
  Synthetic

SEQ ID NO: 22 - RNA, 88 nt, Artificial Sequence; identical to SEQ ID NO: 19
  Synthetic

SEQ ID NO: 23 - RNA, 88 nt, Artificial Sequence; identical to SEQ ID NO: 19
  Synthetic

SEQ ID NO: 24 - RNA, 88 nt, Artificial Sequence; identical to SEQ ID NO: 19
  Synthetic

SEQ ID NO: 25 - RNA, 89 nt, Artificial Sequence
  Synthetic
cagggcucuugaagaucuccguuuuagagcuagaaauagcaaguuaaaauaaggcuaguccguuaucaacuuggcaccgagucggugcu

SEQ ID NO: 26 - RNA, 100 nt, Artificial Sequence
  Synthetic
cagggcucuugaagaucuccguuuuagagcuagaaauagcaaguuaaaauaaggcuaguccguuaucaacuugaaaaaguggcaccgagucggugcuuuu

SEQ ID NO: 27 - RNA, 100 nt, Artificial Sequence; identical to SEQ ID NO: 26
  Synthetic

SEQ ID NO: 28 - RNA, 88 nt, Artificial Sequence; identical to SEQ ID NO: 2
  Synthetic

SEQ ID NO: 29 - RNA, 82 nt, Artificial Sequence
  Synthetic
uuacagccacgucuacagcaguuuuagaggaaacaaguuaaaauaaggcuaguccguuaucaacuuggcaccgagucggugc

SEQ ID NO: 30 - RNA, 82 nt, Artificial Sequence; identical to SEQ ID NO: 29
  Synthetic

SEQ ID NO: 31 - RNA, 81 nt, Artificial Sequence
  Synthetic
uuacagccacgucuacagcaguuuuagagcuagaaauagcaaguuaaaauaaggcuaguccguuaucaacuugaaaaagug

SEQ ID NO: 32 - RNA, 81 nt, Artificial Sequence; identical to SEQ ID NO: 31
  Synthetic

SEQ ID NO: 33 - RNA, 96 nt, Artificial Sequence
  Synthetic
uuacagccacgucuacagcaguuuuagagcuagaaauagcaaguuaaaauaaggcuaguccguuaucaacuugaaaaaguggcaccgagucggugc

SEQ ID NO: 34 - RNA, 88 nt, Artificial Sequence; identical to SEQ ID NO: 2
  Synthetic

SEQ ID NO: 35 - RNA, 88 nt, Artificial Sequence; identical to SEQ ID NO: 2
  Synthetic

SEQ ID NO: 36 - RNA, 88 nt, Artificial Sequence; identical to SEQ ID NO: 2
  Synthetic

SEQ ID NO: 37 - RNA, 88 nt, Artificial Sequence; identical to SEQ ID NO: 2
  Synthetic

SEQ ID NO: 38 - RNA, 88 nt, Artificial Sequence; identical to SEQ ID NO: 2
  Synthetic

SEQ ID NO: 39 - RNA, 88 nt, Artificial Sequence; identical to SEQ ID NO: 2
  Synthetic

SEQ ID NO: 40 - RNA, 88 nt, Artificial Sequence; identical to SEQ ID NO: 2
  Synthetic

SEQ ID NO: 41 - RNA, 88 nt, Artificial Sequence; identical to SEQ ID NO: 2
  Synthetic

SEQ ID NO: 42 - RNA, 88 nt, Artificial Sequence; identical to SEQ ID NO: 2
  Synthetic

SEQ ID NO: 43 - RNA, 100 nt, Artificial Sequence
  Synthetic
acgcaaauaucaguccagcgguuuuagagcuagaaauagcaaguuaaaauaaggcuaguccguuaucaacuugaaaaaguggcaccgagucggugcuuuu

SEQ ID NO: 44 - RNA, 88 nt, Artificial Sequence
  Synthetic
acgcaaauaucaguccagcgguuuuagagcuagaaauagcaaguuaaaauaaggcuaguccguuaucaacuuggcaccgagucggugc

SEQ ID NO: 45 - RNA, 88 nt, Artificial Sequence; identical to SEQ ID NO: 44
  Synthetic

SEQ ID NO: 46 - RNA, 88 nt, Artificial Sequence; identical to SEQ ID NO: 44
  Synthetic

SEQ ID NO: 47 - RNA, 88 nt, Artificial Sequence
  Synthetic
ucuagaacuuugaccaucagguuuuagagcuagaaauagcaaguuaaaauaaggcuaguccguuaucaacuuggcaccgagucggugc

SEQ ID NO: 48 - RNA, 88 nt, Artificial Sequence; identical to SEQ ID NO: 47
  Synthetic

SEQ ID NO: 49 - RNA, 100 nt, Artificial Sequence
  Synthetic
ucuagaacuuugaccaucagguuuuagagcuagaaauagcaaguuaaaauaaggcuaguccguuaucaacuugaaaaaguggcaccgagucggugcuuuu

SEQ ID NO: 50 - RNA, 88 nt, Artificial Sequence
  Synthetic
ugaauccaaguguccucugaguuuuagagcuagaaauagcaaguuaaaauaaggcuaguccguuaucaacuuggcaccgagucggugc

SEQ ID NO: 51 - RNA, 88 nt, Artificial Sequence; identical to SEQ ID NO: 50
  Synthetic

SEQ ID NO: 52 - RNA, 100 nt, Artificial Sequence
  Synthetic
ugaauccaaguguccucugaguuuuagagcuagaaauagcaaguuaaaauaaggcuaguccguuaucaacuugaaaaaguggcaccgagucggugcuuuu

SEQ ID NO: 53 - RNA, 88 nt, Artificial Sequence
  Synthetic
acacaaauaccaguccagcgguuuuagagcuagaaauagcaaguuaaaauaaggcuaguccguuaucaacuuggcaccgagucggugc

SEQ ID NO: 54 - RNA, 88 nt, Artificial Sequence; identical to SEQ ID NO: 53
  Synthetic

SEQ ID NO: 55-200 - skipped (146 entries)

SEQ ID NO: 201 - RNA, 80 nt, Artificial Sequence
  Synthetic
guuuuagagcuagaaauagcaaguuaaaauaaggcuaguccguuaucaacuugaaaaaguggcaccgagucggugcuuuu

SEQ ID NO: 202 - RNA, 68 nt, Artificial Sequence
  Synthetic
guuuuagagcuagaaauagcaaguuaaaauaaggcuaguccguuaucaacuuggcaccgagucggugc

SEQ ID NO: 203 - RNA, 71 nt, Artificial Sequence
  Synthetic
guuuuagagcuagaaauagcaaguuaaaauaaggcuaguccguuaucaacuuggcaccgagucggugcuuu

SEQ ID NO: 204 - RNA, 68 nt, Artificial Sequence; identical to SEQ ID NO: 202
  Synthetic

SEQ ID NO: 205 - RNA, 68 nt, Artificial Sequence; identical to SEQ ID NO: 202
  Synthetic

SEQ ID NO: 206 - RNA, 68 nt, Artificial Sequence; identical to SEQ ID NO: 202
  Synthetic

SEQ ID NO: 207 - RNA, 68 nt, Artificial Sequence; identical to SEQ ID NO: 202
  Synthetic

SEQ ID NO: 208 - RNA, 69 nt, Artificial Sequence
  Synthetic
guuuuagagcuagaaauagcaaguuaaaauaaggcuaguccguuaucaacuuggcaccgagucggugcu

SEQ ID NO: 209 - RNA, 80 nt, Artificial Sequence; identical to SEQ ID NO: 201
  Synthetic

SEQ ID NO: 210 - RNA, 80 nt, Artificial Sequence; identical to SEQ ID NO: 201
  Synthetic

SEQ ID NO: 211 - RNA, 68 nt, Artificial Sequence; identical to SEQ ID NO: 202
  Synthetic

SEQ ID NO: 212 - RNA, 71 nt, Artificial Sequence; identical to SEQ ID NO: 203
  Synthetic

SEQ ID NO: 213 - RNA, 68 nt, Artificial Sequence; identical to SEQ ID NO: 202
  Synthetic

SEQ ID NO: 214 - RNA, 68 nt, Artificial Sequence; identical to SEQ ID NO: 202
  Synthetic

SEQ ID NO: 215 - RNA, 68 nt, Artificial Sequence; identical to SEQ ID NO: 202
  Synthetic

SEQ ID NO: 216 - RNA, 68 nt, Artificial Sequence; identical to SEQ ID NO: 202
  Synthetic

SEQ ID NO: 217 - RNA, 69 nt, Artificial Sequence; identical to SEQ ID NO: 208
  Synthetic

SEQ ID NO: 218 - RNA, 80 nt, Artificial Sequence; identical to SEQ ID NO: 201
  Synthetic

SEQ ID NO: 219 - RNA, 68 nt, Artificial Sequence; identical to SEQ ID NO: 202
  Synthetic

SEQ ID NO: 220 - RNA, 71 nt, Artificial Sequence; identical to SEQ ID NO: 203
  Synthetic

SEQ ID NO: 221 - RNA, 68 nt, Artificial Sequence; identical to SEQ ID NO: 202
  Synthetic

SEQ ID NO: 222 - RNA, 68 nt, Artificial Sequence; identical to SEQ ID NO: 202
  Synthetic

SEQ ID NO: 223 - RNA, 68 nt, Artificial Sequence; identical to SEQ ID NO: 202
  Synthetic

SEQ ID NO: 224 - RNA, 68 nt, Artificial Sequence; identical to SEQ ID NO: 202
  Synthetic

SEQ ID NO: 225 - RNA, 69 nt, Artificial Sequence; identical to SEQ ID NO: 208
  Synthetic

SEQ ID NO: 226 - RNA, 80 nt, Artificial Sequence; identical to SEQ ID NO: 201
  Synthetic

SEQ ID NO: 227 - RNA, 80 nt, Artificial Sequence; identical to SEQ ID NO: 201
  Synthetic

SEQ ID NO: 228 - RNA, 68 nt, Artificial Sequence; identical to SEQ ID NO: 202
  Synthetic

SEQ ID NO: 229 - RNA, 62 nt, Artificial Sequence
  Synthetic
guuuuagaggaaacaaguuaaaauaaggcuaguccguuaucaacuuggcaccgagucggugc

SEQ ID NO: 230 - RNA, 62 nt, Artificial Sequence; identical to SEQ ID NO: 229
  Synthetic

SEQ ID NO: 231 - RNA, 61 nt, Artificial Sequence
  Synthetic
guuuuagagcuagaaauagcaaguuaaaauaaggcuaguccguuaucaacuugaaaaagug

SEQ ID NO: 232 - RNA, 61 nt, Artificial Sequence; identical to SEQ ID NO: 231
  Synthetic

SEQ ID NO: 233 - RNA, 76 nt, Artificial Sequence
  Synthetic
guuuuagagcuagaaauagcaaguuaaaauaaggcuaguccguuaucaacuugaaaaaguggcaccgagucggugc

SEQ ID NO: 234 - RNA, 68 nt, Artificial Sequence; identical to SEQ ID NO: 202
  Synthetic

SEQ ID NO: 235 - RNA, 68 nt, Artificial Sequence; identical to SEQ ID NO: 202
  Synthetic

SEQ ID NO: 236 - RNA, 68 nt, Artificial Sequence; identical to SEQ ID NO: 202
  Synthetic

SEQ ID NO: 237 - RNA, 68 nt, Artificial Sequence; identical to SEQ ID NO: 202
  Synthetic

SEQ ID NO: 238 - RNA, 68 nt, Artificial Sequence; identical to SEQ ID NO: 202
  Synthetic

SEQ ID NO: 239 - RNA, 68 nt, Artificial Sequence; identical to SEQ ID NO: 202
  Synthetic

SEQ ID NO: 240 - RNA, 68 nt, Artificial Sequence; identical to SEQ ID NO: 202
  Synthetic

SEQ ID NO: 241 - RNA, 68 nt, Artificial Sequence; identical to SEQ ID NO: 202
  Synthetic

SEQ ID NO: 242 - RNA, 68 nt, Artificial Sequence; identical to SEQ ID NO: 202
  Synthetic

SEQ ID NO: 243 - RNA, 80 nt, Artificial Sequence; identical to SEQ ID NO: 201
  Synthetic

SEQ ID NO: 244 - RNA, 68 nt, Artificial Sequence; identical to SEQ ID NO: 202
  Synthetic

SEQ ID NO: 245 - RNA, 68 nt, Artificial Sequence; identical to SEQ ID NO: 202
  Synthetic

SEQ ID NO: 246 - RNA, 68 nt, Artificial Sequence; identical to SEQ ID NO: 202
  Synthetic

SEQ ID NO: 247 - RNA, 68 nt, Artificial Sequence; identical to SEQ ID NO: 202
  Synthetic

SEQ ID NO: 248 - RNA, 68 nt, Artificial Sequence; identical to SEQ ID NO: 202
  Synthetic

SEQ ID NO: 249 - RNA, 80 nt, Artificial Sequence; identical to SEQ ID NO: 201
  Synthetic

SEQ ID NO: 250 - RNA, 68 nt, Artificial Sequence; identical to SEQ ID NO: 202
  Synthetic

SEQ ID NO: 251 - RNA, 68 nt, Artificial Sequence; identical to SEQ ID NO: 202
  Synthetic

SEQ ID NO: 252 - RNA, 80 nt, Artificial Sequence; identical to SEQ ID NO: 201
  Synthetic

SEQ ID NO: 253 - RNA, 68 nt, Artificial Sequence; identical to SEQ ID NO: 202
  Synthetic

SEQ ID NO: 254 - RNA, 68 nt, Artificial Sequence; identical to SEQ ID NO: 202
  Synthetic

SEQ ID NO: 255-300 - skipped (46 entries)

SEQ ID NO: 301 - RNA, 108 nt, Artificial Sequence
  Synthetic
  misc_feature (1)..(28): n is a, c, g, or u
  misc_feature (4)..(28): at least 5 n are present and 6-25 n may be present or absent
nnnnnnnnnnnnnnnnnnnnnnnnnnnnguuuuagagcuagaaauagcaaguuaaaauaaggcuaguccguuaucaacuugaaaaaguggcaccgagucggugcuuuu

SEQ ID NO: 302 - RNA, 96 nt, Artificial Sequence
  Synthetic
  misc_feature (1)..(28): n is a, c, g, or u
  misc_feature (4)..(28): at least 5 n are present and 6-25 n may be present or absent
nnnnnnnnnnnnnnnnnnnnnnnnnnnnguuuuagagcuagaaauagcaaguuaaaauaaggcuaguccguuaucaacuuggcaccgagucggugc

SEQ ID NO: 303 - RNA, 99 nt, Artificial Sequence
  Synthetic
  misc_feature (1)..(28): n is a, c, g, or u
  misc_feature (4)..(28): at least 5 n are present and 6-25 n may be present or absent
nnnnnnnnnnnnnnnnnnnnnnnnnnnnguuuuagagcuagaaauagcaaguuaaaauaaggcuaguccguuaucaacuuggcaccgagucggugcuuu

SEQ ID NO: 304 - RNA, 96 nt, Artificial Sequence; identical to SEQ ID NO: 302
  Synthetic
  misc_feature (1)..(28): n is a, c, g, or u
  misc_feature (4)..(28): at least 5 n are present and 6-25 n may be present or absent

SEQ ID NO: 305 - RNA, 96 nt, Artificial Sequence; identical to SEQ ID NO: 302
  Synthetic
  misc_feature (1)..(28): n is a, c, g, or u
  misc_feature (4)..(28): at least 5 n are present and 6-25 n may be present or absent

SEQ ID NO: 306 - RNA, 96 nt, Artificial Sequence; identical to SEQ ID NO: 302
  Synthetic
  misc_feature (1)..(28): n is a, c, g, or u
  misc_feature (4)..(28): at least 5 n are present and 6-25 n may be present or absent

SEQ ID NO: 307 - RNA, 96 nt, Artificial Sequence; identical to SEQ ID NO: 302
  Synthetic
  misc_feature (1)..(28): n is a, c, g, or u
  misc_feature (4)..(28): at least 5 n are present and 6-25 n may be present or absent

SEQ ID NO: 308 - RNA, 97 nt, Artificial Sequence
  Synthetic
  misc_feature (1)..(28): n is a, c, g, or u
  misc_feature (4)..(28): at least 5 n are present and 6-25 n may be present or absent
nnnnnnnnnnnnnnnnnnnnnnnnnnnnguuuuagagcuagaaauagcaaguuaaaauaaggcuaguccguuaucaacuuggcaccgagucggugcu

SEQ ID NO: 309 - RNA, 108 nt, Artificial Sequence; identical to SEQ ID NO: 301
  Synthetic
  misc_feature (1)..(28): n is a, c, g, or u
  misc_feature (4)..(28): at least 5 n are present and 6-25 n may be present or absent

SEQ ID NO: 310 - RNA, 108 nt, Artificial Sequence; identical to SEQ ID NO: 301
  Synthetic
  misc_feature (1)..(28): n is a, c, g, or u
  misc_feature (4)..(28): at least 5 n are present and 6-25 n may be present or absent

SEQ ID NO: 311 - RNA, 96 nt, Artificial Sequence; identical to SEQ ID NO: 302
  Synthetic
  misc_feature (1)..(28): n is a, c, g, or u
  misc_feature (4)..(28): at least 5 n are present and 6-25 n may be present or absent

SEQ ID NO: 312 - RNA, 99 nt, Artificial Sequence; identical to SEQ ID NO: 303
  Synthetic
  misc_feature (1)..(28): n is a, c, g, or u
  misc_feature (4)..(28): at least 5 n are present and 6-25 n may be present or absent

SEQ ID NO: 313 - RNA, 96 nt, Artificial Sequence; identical to SEQ ID NO: 302
  Synthetic
  misc_feature (1)..(28): n is a, c, g, or u
  misc_feature (4)..(28): at least 5 n are present and 6-25 n may be present or absent

SEQ ID NO: 314 - RNA, 96 nt, Artificial Sequence; identical to SEQ ID NO: 302
  Synthetic
  misc_feature (1)..(28): n is a, c, g, or u
  misc_feature (4)..(28): at least 5 n are present and 6-25 n may be present or absent

SEQ ID NO: 315 - RNA, 96 nt, Artificial Sequence; identical to SEQ ID NO: 302
  Synthetic
  misc_feature (1)..(28): n is a, c, g, or u
  misc_feature (4)..(28): at least 5 n are present and 6-25 n may be present or absent

SEQ ID NO: 316 - RNA, 96 nt, Artificial Sequence; identical to SEQ ID NO: 302
  Synthetic
  misc_feature (1)..(28): n is a, c, g, or u
  misc_feature (4)..(28): at least 5 n are present and 6-25 n may be present or absent

SEQ ID NO: 317 - RNA, 97 nt, Artificial Sequence; identical to SEQ ID NO: 308
  Synthetic
  misc_feature (1)..(28): n is a, c, g, or u
  misc_feature (4)..(28): at least 5 n are present and 6-25 n may be present or absent

SEQ ID NO: 318 - RNA, 108 nt, Artificial Sequence; identical to SEQ ID NO: 301
  Synthetic
  misc_feature (1)..(28): n is a, c, g, or u
  misc_feature (4)..(28): at least 5 n are present and 6-25 n may be present or absent

SEQ ID NO: 319 - RNA, 96 nt, Artificial Sequence; identical to SEQ ID NO: 302
  Synthetic
  misc_feature (1)..(28): n is a, c, g, or u
  misc_feature (4)..(28): at least 5 n are present and 6-25 n may be present or absent

SEQ ID NO: 320 - RNA, 99 nt, Artificial Sequence; identical to SEQ ID NO: 303
  Synthetic
  misc_feature (1)..(28): n is a, c, g, or u
  misc_feature (4)..(28): at least 5 n are present and 6-25 n may be present or absent

SEQ ID NO: 321 - RNA, 96 nt, Artificial Sequence; identical to SEQ ID NO: 302
  Synthetic
  misc_feature (1)..(28): n is a, c, g, or u
  misc_feature (4)..(28): at least 5 n are present and 6-25 n may be present or absent

SEQ ID NO: 322 - RNA, 96 nt, Artificial Sequence; identical to SEQ ID NO: 302
  Synthetic
  misc_feature (1)..(28): n is a, c, g, or u
  misc_feature (4)..(28): at least 5 n are present and 6-25 n may be present or absent

SEQ ID NO: 323 - RNA, 96 nt, Artificial Sequence; identical to SEQ ID NO: 302
  Synthetic
  misc_feature (1)..(28): n is a, c, g, or u
  misc_feature (4)..(28): at least 5 n are present and 6-25 n may be present or absent

SEQ ID NO: 324 - RNA, 96 nt, Artificial Sequence; identical to SEQ ID NO: 302
  Synthetic
  misc_feature (1)..(28): n is a, c, g, or u
  misc_feature (4)..(28): at least 5 n are present and 6-25 n may be present or absent

SEQ ID NO: 325 - RNA, 97 nt, Artificial Sequence; identical to SEQ ID NO: 308
  Synthetic
  misc_feature (1)..(28): n is a, c, g, or u
  misc_feature (4)..(28): at least 5 n are present and 6-25 n may be present or absent

SEQ ID NO: 326 - RNA, 108 nt, Artificial Sequence; identical to SEQ ID NO: 301
  Synthetic
  misc_feature (1)..(28): n is a, c, g, or u
  misc_feature (4)..(28): at least 5 n are present and 6-25 n may be present or absent

SEQ ID NO: 327 - RNA, 108 nt, Artificial Sequence; identical to SEQ ID NO: 301
  Synthetic
  misc_feature (1)..(28): n is a, c, g, or u
  misc_feature (4)..(28): at least 5 n are present and 6-25 n may be present or absent

SEQ ID NO: 328 - RNA, 96 nt, Artificial Sequence; identical to SEQ ID NO: 302
  Synthetic
  misc_feature (1)..(28): n is a, c, g, or u
  misc_feature (4)..(28): at least 5 n are present and 6-25 n may be present or absent

SEQ ID NO: 329 - RNA, 90 nt, Artificial Sequence
  Synthetic
  misc_feature (1)..(28): n is a, c, g, or u
  misc_feature (4)..(28): at least 5 n are present and 6-25 n may be present or absent
nnnnnnnnnnnnnnnnnnnnnnnnnnnnguuuuagaggaaacaaguuaaaauaaggcuaguccguuaucaacuuggcaccgagucggugc

SEQ ID NO: 330 - RNA, 90 nt, Artificial Sequence; identical to SEQ ID NO: 329
  Synthetic
  misc_feature (1)..(28): n is a, c, g, or u
  misc_feature (4)..(28): at least 5 n are present and 6-25 n may be present or absent

SEQ ID NO: 331 - RNA, 89 nt, Artificial Sequence
  Synthetic
  misc_feature (1)..(28): n is a, c, g, or u
  misc_feature (4)..(28): at least 5 n are present and 6-25 n may be present or absent
nnnnnnnnnnnnnnnnnnnnnnnnnnnnguuuuagagcuagaaauagcaaguuaaaauaaggcuaguccguuaucaacuugaaaaagug

SEQ ID NO: 332 - RNA, 89 nt, Artificial Sequence; identical to SEQ ID NO: 331
  Synthetic
  misc_feature (1)..(28): n is a, c, g, or u
  misc_feature (4)..(28): at least 5 n are present and 6-25 n may be present or absent

SEQ ID NO: 333 - RNA, 104 nt, Artificial Sequence
  Synthetic
  misc_feature (1)..(28): n is a, c, g, or u
  misc_feature (4)..(28): at least 5 n are present and 6-25 n may be present or absent
nnnnnnnnnnnnnnnnnnnnnnnnnnnnguuuuagagcuagaaauagcaaguuaaaauaaggcuaguccguuaucaacuugaaaaaguggcaccgagucggugc

SEQ ID NO: 334 - RNA, 96 nt, Artificial Sequence; identical to SEQ ID NO: 302
  Synthetic
  misc_feature (1)..(28): n is a, c, g, or u
  misc_feature (4)..(28): at least 5 n are present and 6-25 n may be present or absent

SEQ ID NO: 335 - RNA, 98 nt, Artificial Sequence
  Synthetic
  misc_feature (1)..(30): n is a, c, g, or u
  misc_feature (6)..(30): at least 5 n are present and 6-25 n may be present or absent
nnnnnnnnnnnnnnnnnnnnnnnnnnnnnnguuuuagagcuagaaauagcaaguuaaaauaaggcuaguccguuaucaacuuggcaccgagucggugc

SEQ ID NO: 336 - RNA, 96 nt, Artificial Sequence; identical to SEQ ID NO: 302
  Synthetic
  misc_feature (1)..(28): n is a, c, g, or u
  misc_feature (4)..(28): at least 5 n are present and 6-25 n may be present or absent

SEQ ID NO: 337 - RNA, 93 nt, Artificial Sequence
  Synthetic
  misc_feature (1)..(25): n is a, c, g, or u
  misc_feature (1)..(25): at least 5 n are present and 6-25 n may be present or absent
nnnnnnnnnnnnnnnnnnnnnnnnnguuuuagagcuagaaauagcaaguuaaaauaaggcuaguccguuaucaacuuggcaccgagucggugc

SEQ ID NO: 338 - RNA, 96 nt, Artificial Sequence; identical to SEQ ID NO: 302
  Synthetic
  misc_feature (1)..(28): n is a, c, g, or u
  misc_feature (4)..(28): at least 5 n are present and 6-25 n may be present or absent

SEQ ID NO: 339 - RNA, 96 nt, Artificial Sequence; identical to SEQ ID NO: 302
  Synthetic
  misc_feature (1)..(28): n is a, c, g, or u
  misc_feature (4)..(28): at least 5 n are present and 6-25 n may be present or absent

SEQ ID NO: 340 - RNA, 96 nt, Artificial Sequence; identical to SEQ ID NO: 302
  Synthetic
  misc_feature (1)..(28): n is a, c, g, or u
  misc_feature (4)..(28): at least 5 n are present and 6-25 n may be present or absent

SEQ ID NO: 341 - RNA, 96 nt, Artificial Sequence; identical to SEQ ID NO: 302
  Synthetic
  misc_feature (1)..(28): n is a, c, g, or u
  misc_feature (4)..(28): at least 5 n are present and 6-25 n may be present or absent

SEQ ID NO: 342 - RNA, 96 nt, Artificial Sequence; identical to SEQ ID NO: 302
  Synthetic
  misc_feature (1)..(28): n is a, c, g, or u
  misc_feature (4)..(28): at least 5 n are present and 6-25 n may be present or absent

SEQ ID NO: 343 - RNA, 108 nt, Artificial Sequence; identical to SEQ ID NO: 301
  Synthetic
  misc_feature (1)..(28): n is a, c, g, or u
  misc_feature (4)..(28): at least 5 n are present and 6-25 n may be present or absent

SEQ ID NO: 344 - RNA, 96 nt, Artificial Sequence; identical to SEQ ID NO: 302
  Synthetic
  misc_feature (1)..(28): n is a, c, g, or u
  misc_feature (4)..(28): at least 5 n are present and 6-25 n may be present or absent

SEQ ID NO: 345 - RNA, 96 nt, Artificial Sequence; identical to SEQ ID NO: 302
  Synthetic
  misc_feature (1)..(28): n is a, c, g, or u
  misc_feature (4)..(28): at least 5 n are present and 6-25 n may be present or absent

SEQ ID NO: 346 - RNA, 96 nt, Artificial Sequence; identical to SEQ ID NO: 302
  Synthetic
  misc_feature (1)..(28): n is a, c, g, or u
  misc_feature (4)..(28): at least 5 n are present and 6-25 n may be present or absent

SEQ ID NO: 347 - RNA, 96 nt, Artificial Sequence; identical to SEQ ID NO: 302
  Synthetic
  misc_feature (1)..(28): n is a, c, g, or u
  misc_feature (4)..(28): at least 5 n are present and 6-25 n may be present or absent

SEQ ID NO: 348 - RNA, 96 nt, Artificial Sequence; identical to SEQ ID NO: 302
  Synthetic
  misc_feature (1)..(28): n is a, c, g, or u
  misc_feature (4)..(28): at least 5 n are present and 6-25 n may be present or absent

SEQ ID NO: 349 - RNA, 108 nt, Artificial Sequence; identical to SEQ ID NO: 301
  Synthetic
  misc_feature (1)..(28): n is a, c, g, or u
  misc_feature (4)..(28): at least 5 n are present and 6-25 n may be present or absent

SEQ ID NO: 350 - RNA, 96 nt, Artificial Sequence; identical to SEQ ID NO: 302
  Synthetic
  misc_feature (1)..(28): n is a, c, g, or u
  misc_feature (4)..(28): at least 5 n are present and 6-25 n may be present or absent

SEQ ID NO: 351 - RNA, 96 nt, Artificial Sequence; identical to SEQ ID NO: 302
  Synthetic
  misc_feature (1)..(28): n is a, c, g, or u
  misc_feature (4)..(28): at least 5 n are present and 6-25 n may be present or absent

SEQ ID NO: 352 - RNA, 108 nt, Artificial Sequence; identical to SEQ ID NO: 301
  Synthetic
  misc_feature (1)..(28): n is a, c, g, or u
  misc_feature (4)..(28): at least 5 n are present and 6-25 n may be present or absent

SEQ ID NO: 353 - RNA, 96 nt, Artificial Sequence; identical to SEQ ID NO: 302
  Synthetic
  misc_feature (1)..(28): n is a, c, g, or u
  misc_feature (4)..(28): at least 5 n are present and 6-25 n may be present or absent

SEQ ID NO: 354 - RNA, 110 nt, Artificial Sequence
  Synthetic
  misc_feature (1)..(42): n is a, c, g, or u
  misc_feature (18)..(42): at least 5 n are present and 6-25 n may be present or absent
nnnnnnnnnnnnnnnnnnnnnnnnnnnnnnnnnnnnnnnnnnguuuuagagcuagaaauagcaaguuaaaauaaggcuaguccguuaucaacuuggcaccgagucggugc

SEQ ID NO: 355-399 - skipped (45 entries)

SEQ ID NO: 400 - RNA, 76 nt, Artificial Sequence; identical to SEQ ID NO: 233
  Synthetic

SEQ ID NO: 401 - RNA, 100 nt, Artificial Sequence; identical to SEQ ID NO: 1
  Synthetic

SEQ ID NO: 402 - RNA, 100 nt, Artificial Sequence
  Synthetic
aaaggcugcugaugacaccuguuuuagagcuagaaauagcaaguuaaaauaaggcuaguccguuaucaacuugaaaaaguggcaccgagucggugcuuuu

SEQ ID NO: 403 - RNA, 100 nt, Artificial Sequence; identical to SEQ ID NO: 49
  Synthetic

SEQ ID NO: 404 - RNA, 100 nt, Artificial Sequence
  Synthetic
acacaaauaccaguccagcgguuuuagagcuagaaauagcaaguuaaaauaaggcuaguccguuaucaacuugaaaaaguggcaccgagucggugcuuuu

SEQ ID NO: 405 - RNA, 100 nt, Artificial Sequence
  Synthetic
aaaggcugcugaugagaccuguuuuagagcuagaaauagcaaguuaaaauaaggcuaguccguuaucaacuugaaaaaguggcaccgagucggugcuuuu

SEQ ID NO: 406 - RNA, 100 nt, Artificial Sequence
  Synthetic
aaaguucuagaugccguccgguuuuagagcuagaaauagcaaguuaaaauaaggcuaguccguuaucaacuugaaaaaguggcaccgagucggugcuuuu

SEQ ID NO: 407 - DNA, 100 bp, Artificial Sequence
  Synthetic
ttacagccacgucuacagcaguuuuagagcuagaaauagcaaguuaaaauaaggcuaguccguuaucaacuugaaaaaguggcaccgagucggugcuttt

SEQ ID NO: 408 - DNA, 100 bp, Artificial Sequence
  Synthetic
uuacagccacgucuacagcaguuuuagagcuagaaauagcaaguuaaaauaaggcuaguccguuaucaacuugaaaaaguggcaccgagtcggtgctttt

SEQ ID NO: 409 - DNA, 100 bp, Artificial Sequence
  Synthetic
uuacagccacgucuacagcaguuuuagagcuagaaauagcaaguuaaaauaaggcuaguccguuaucaacttgaaaaagtggcaccgagtcggtgctttt

SEQ ID NO: 410 - DNA, 100 bp, Artificial Sequence
  Synthetic
uuacagccacgucuacagcaguuuuagagctagaaatagcaaguuaaaauaaggcuaguccguuaucaacttgaaaaagtggcaccgagtcggtgctttt

SEQ ID NO: 411 - DNA, 100 bp, Artificial Sequence
  Synthetic
ttacagccacgucuacagcaguuuuagagctagaaatagcaaguuaaaauaaggcuaguccguuaucaacttgaaaaagtggcaccgagtcggtgctttt

SEQ ID NO: 412 - RNA, 100 nt, Artificial Sequence; identical to SEQ ID NO: 1
  Synthetic

SEQ ID NO: 413 - RNA, 100 nt, Artificial Sequence; identical to SEQ ID NO: 1
  Synthetic

SEQ ID NO: 414 - RNA, 100 nt, Artificial Sequence; identical to SEQ ID NO: 1
  Synthetic

SEQ ID NO: 415 - RNA, 100 nt, Artificial Sequence; identical to SEQ ID NO: 1
  Synthetic

SEQ ID NO: 416 - RNA, 100 nt, Artificial Sequence; identical to SEQ ID NO: 1
  Synthetic

SEQ ID NO: 417 - RNA, 100 nt, Artificial Sequence; identical to SEQ ID NO: 1
  Synthetic

SEQ ID NO: 418 - RNA, 100 nt, Artificial Sequence; identical to SEQ ID NO: 1
  Synthetic

SEQ ID NO: 419 - RNA, 100 nt, Artificial Sequence; identical to SEQ ID NO: 1
  Synthetic

SEQ ID NO: 420 - RNA, 100 nt, Artificial Sequence; identical to SEQ ID NO: 1
  Synthetic

SEQ ID NO: 421 - RNA, 100 nt, Artificial Sequence; identical to SEQ ID NO: 1
  Synthetic

SEQ ID NO: 422 - RNA, 100 nt, Artificial Sequence; identical to SEQ ID NO: 1
  Synthetic

SEQ ID NO: 423 - RNA, 100 nt, Artificial Sequence; identical to SEQ ID NO: 1
  Synthetic

SEQ ID NO: 424 - RNA, 100 nt, Artificial Sequence; identical to SEQ ID NO: 404
  Synthetic

SEQ ID NO: 425 - RNA, 100 nt, Artificial Sequence; identical to SEQ ID NO: 404
  Synthetic

SEQ ID NO: 426 - RNA, 100 nt, Artificial Sequence; identical to SEQ ID NO: 404
  Synthetic

SEQ ID NO: 427 - RNA, 100 nt, Artificial Sequence; identical to SEQ ID NO: 404
  Synthetic

SEQ ID NO: 428 - RNA, 100 nt, Artificial Sequence; identical to SEQ ID NO: 404
  Synthetic

SEQ ID NO: 429 - RNA, 100 nt, Artificial Sequence; identical to SEQ ID NO: 404
  Synthetic

SEQ ID NO: 430 - RNA, 100 nt, Artificial Sequence; identical to SEQ ID NO: 404
  Synthetic

SEQ ID NO: 431 - RNA, 100 nt, Artificial Sequence; identical to SEQ ID NO: 404
  Synthetic

SEQ ID NO: 432 - RNA, 100 nt, Artificial Sequence; identical to SEQ ID NO: 404
  Synthetic

SEQ ID NO: 433 - RNA, 100 nt, Artificial Sequence; identical to SEQ ID NO: 404
  Synthetic

SEQ ID NO: 434 - RNA, 100 nt, Artificial Sequence; identical to SEQ ID NO: 404
  Synthetic

SEQ ID NO: 435 - RNA, 100 nt, Artificial Sequence; identical to SEQ ID NO: 404
  Synthetic

SEQ ID NO: 436 - DNA, 100 bp, Artificial Sequence
  Synthetic
ttacagccacgucuacagcaguuuuagagcuagaaauagcaaguuaaaauaaggcuaguccguuaucaacuugaaaaaguggcaccgagucggugctttu

SEQ ID NO: 437 - RNA, 100 nt, Artificial Sequence; identical to SEQ ID NO: 1
  Synthetic

SEQ ID NO: 438 - RNA, 100 nt, Artificial Sequence; identical to SEQ ID NO: 1
  Synthetic

SEQ ID NO: 439 - RNA, 100 nt, Artificial Sequence; identical to SEQ ID NO: 1
  Synthetic

SEQ ID NO: 440 - RNA, 100 nt, Artificial Sequence; identical to SEQ ID NO: 1
  Synthetic

SEQ ID NO: 441 - RNA, 100 nt, Artificial Sequence; identical to SEQ ID NO: 1
  Synthetic

SEQ ID NO: 442 - RNA, 100 nt, Artificial Sequence; identical to SEQ ID NO: 1
  Synthetic

SEQ ID NO: 443 - RNA, 100 nt, Artificial Sequence; identical to SEQ ID NO: 1
  Synthetic

SEQ ID NO: 444 - RNA, 100 nt, Artificial Sequence; identical to SEQ ID NO: 1
  Synthetic

SEQ ID NO: 445 - RNA, 100 nt, Artificial Sequence; identical to SEQ ID NO: 1
  Synthetic

SEQ ID NO: 446 - RNA, 100 nt, Artificial Sequence; identical to SEQ ID NO: 1
  Synthetic

SEQ ID NO: 447 - RNA, 100 nt, Artificial Sequence; identical to SEQ ID NO: 1
  Synthetic

SEQ ID NO: 448 - RNA, 100 nt, Artificial Sequence; identical to SEQ ID NO: 1
  Synthetic

SEQ ID NO: 449 - RNA, 100 nt, Artificial Sequence; identical to SEQ ID NO: 1
  Synthetic

SEQ ID NO: 450 - RNA, 100 nt, Artificial Sequence; identical to SEQ ID NO: 1
  Synthetic

SEQ ID NO: 451 - RNA, 100 nt, Artificial Sequence; identical to SEQ ID NO: 1
  Synthetic

SEQ ID NO: 452 - RNA, 100 nt, Artificial Sequence; identical to SEQ ID NO: 1
  Synthetic

SEQ ID NO: 453 - RNA, 100 nt, Artificial Sequence; identical to SEQ ID NO: 1
  Synthetic

SEQ ID NO: 454 - RNA, 100 nt, Artificial Sequence; identical to SEQ ID NO: 1
  Synthetic

SEQ ID NO: 455 - RNA, 100 nt, Artificial Sequence; identical to SEQ ID NO: 1
  Synthetic

SEQ ID NO: 456 - RNA, 100 nt, Artificial Sequence; identical to SEQ ID NO: 1
  Synthetic

SEQ ID NO: 457 - RNA, 100 nt, Artificial Sequence; identical to SEQ ID NO: 1
  Synthetic

SEQ ID NO: 458 - RNA, 100 nt, Artificial Sequence; identical to SEQ ID NO: 1
  Synthetic

SEQ ID NO: 459 - RNA, 100 nt, Artificial Sequence; identical to SEQ ID NO: 1
  Synthetic

SEQ ID NO: 460 - RNA, 100 nt, Artificial Sequence; identical to SEQ ID NO: 1
  Synthetic

SEQ ID NO: 461 - RNA, 100 nt, Artificial Sequence; identical to SEQ ID NO: 1
  Synthetic

SEQ ID NO: 462 - RNA, 100 nt, Artificial Sequence; identical to SEQ ID NO: 1
  Synthetic

SEQ ID NO: 463 - RNA, 100 nt, Artificial Sequence; identical to SEQ ID NO: 1
  Synthetic

SEQ ID NO: 464 - DNA, 100 bp, Artificial Sequence
  Synthetic
uuacagccacgucuacagcaguuuuagagcuagaaauagcaagutaaaataaggcuaguccguuaucaacuugaaaaaguggcaccgagucggugcuuuu

SEQ ID NO: 465 - RNA, 100 nt, Artificial Sequence; identical to SEQ ID NO: 1
  Synthetic

SEQ ID NO: 466 - RNA, 100 nt, Artificial Sequence; identical to SEQ ID NO: 1
  Synthetic

SEQ ID NO: 467 - RNA, 100 nt, Artificial Sequence; identical to SEQ ID NO: 404
  Synthetic

SEQ ID NO: 468 - RNA, 100 nt, Artificial Sequence; identical to SEQ ID NO: 404
  Synthetic

SEQ ID NO: 469 - RNA, 100 nt, Artificial Sequence; identical to SEQ ID NO: 404
  Synthetic

SEQ ID NO: 470 - RNA, 100 nt, Artificial Sequence; identical to SEQ ID NO: 404
  Synthetic

SEQ ID NO: 471 - RNA, 100 nt, Artificial Sequence; identical to SEQ ID NO: 404
  Synthetic

SEQ ID NO: 472 - RNA, 100 nt, Artificial Sequence; identical to SEQ ID NO: 404
  Synthetic

SEQ ID NO: 473 - RNA, 100 nt, Artificial Sequence; identical to SEQ ID NO: 404
  Synthetic

SEQ ID NO: 474 - RNA, 100 nt, Artificial Sequence; identical to SEQ ID NO: 404
  Synthetic

SEQ ID NO: 475 - RNA, 100 nt, Artificial Sequence; identical to SEQ ID NO: 404
  Synthetic

SEQ ID NO: 476 - RNA, 100 nt, Artificial Sequence; identical to SEQ ID NO: 404
  Synthetic

SEQ ID NO: 477 - RNA, 100 nt, Artificial Sequence; identical to SEQ ID NO: 404
  Synthetic

SEQ ID NO: 478 - RNA, 100 nt, Artificial Sequence; identical to SEQ ID NO: 404
  Synthetic

SEQ ID NO: 479 - RNA, 100 nt, Artificial Sequence; identical to SEQ ID NO: 404
  Synthetic

SEQ ID NO: 480 - RNA, 100 nt, Artificial Sequence; identical to SEQ ID NO: 404
  Synthetic

SEQ ID NO: 481 - RNA, 100 nt, Artificial Sequence; identical to SEQ ID NO: 404
  Synthetic

SEQ ID NO: 482 - RNA, 100 nt, Artificial Sequence; identical to SEQ ID NO: 404
  Synthetic

SEQ ID NO: 483 - RNA, 100 nt, Artificial Sequence; identical to SEQ ID NO: 404
  Synthetic

SEQ ID NO: 484 - RNA, 100 nt, Artificial Sequence; identical to SEQ ID NO: 404
  Synthetic

SEQ ID NO: 485 - RNA, 100 nt, Artificial Sequence; identical to SEQ ID NO: 404
  Synthetic

SEQ ID NO: 486 - RNA, 100 nt, Artificial Sequence; identical to SEQ ID NO: 404
  Synthetic

SEQ ID NO: 487 - RNA, 100 nt, Artificial Sequence; identical to SEQ ID NO: 404
  Synthetic

SEQ ID NO: 488 - RNA, 100 nt, Artificial Sequence; identical to SEQ ID NO: 404
  Synthetic

SEQ ID NO: 489 - RNA, 100 nt, Artificial Sequence; identical to SEQ ID NO: 404
  Synthetic

SEQ ID NO: 490 - RNA, 100 nt, Artificial Sequence; identical to SEQ ID NO: 404
  Synthetic

SEQ ID NO: 491 - RNA, 100 nt, Artificial Sequence; identical to SEQ ID NO: 404
  Synthetic

SEQ ID NO: 492 - RNA, 100 nt, Artificial Sequence; identical to SEQ ID NO: 404
  Synthetic

SEQ ID NO: 493 - DNA, 100 bp, Artificial Sequence
  Synthetic
acacaaauaccaguccagcgguuuuagagcuagaaauagcaagutaaaataaggcuaguccguuaucaacuugaaaaaguggcaccgagucggugcuuuu

SEQ ID NO: 494 - RNA, 100 nt, Artificial Sequence; identical to SEQ ID NO: 404
  Synthetic

SEQ ID NO: 495 - RNA, 100 nt, Artificial Sequence; identical to SEQ ID NO: 404
  Synthetic

SEQ ID NO: 496 - RNA, 100 nt, Artificial Sequence; identical to SEQ ID NO: 404
  Synthetic

SEQ ID NO: 497 - RNA, 100 nt, Artificial Sequence; identical to SEQ ID NO: 404
  Synthetic

SEQ ID NO: 498 - RNA, 100 nt, Artificial Sequence; identical to SEQ ID NO: 404
  Synthetic

SEQ ID NO: 499 - RNA, 100 nt, Artificial Sequence; identical to SEQ ID NO: 404
  Synthetic

SEQ ID NO: 500 - RNA, 100 nt, Artificial Sequence; identical to SEQ ID NO: 404
  Synthetic

SEQ ID NO: 501 - RNA, 100 nt, Artificial Sequence; identical to SEQ ID NO: 404
  Synthetic

SEQ ID NO: 502 - RNA, 100 nt, Artificial Sequence; identical to SEQ ID NO: 404
  Synthetic

SEQ ID NO: 503 - RNA, 100 nt, Artificial Sequence; identical to SEQ ID NO: 404
  Synthetic

SEQ ID NO: 504 - RNA, 100 nt, Artificial Sequence; identical to SEQ ID NO: 404
  Synthetic

SEQ ID NO: 505 - RNA, 100 nt, Artificial Sequence; identical to SEQ ID NO: 404
  Synthetic

SEQ ID NO: 506 - RNA, 100 nt, Artificial Sequence; identical to SEQ ID NO: 404
  Synthetic

SEQ ID NO: 507 - RNA, 100 nt, Artificial Sequence; identical to SEQ ID NO: 404
  Synthetic

SEQ ID NO: 508 - RNA, 100 nt, Artificial Sequence; identical to SEQ ID NO: 404
  Synthetic

SEQ ID NO: 509 - RNA, 100 nt, Artificial Sequence; identical to SEQ ID NO: 404
  Synthetic

SEQ ID NO: 510 - RNA, 100 nt, Artificial Sequence; identical to SEQ ID NO: 404
  Synthetic

SEQ ID NO: 511 - RNA, 100 nt, Artificial Sequence; identical to SEQ ID NO: 404
  Synthetic

SEQ ID NO: 512 - RNA, 100 nt, Artificial Sequence; identical to SEQ ID NO: 404
  Synthetic

SEQ ID NO: 513 - RNA, 100 nt, Artificial Sequence; identical to SEQ ID NO: 404
  Synthetic

SEQ ID NO: 514 - RNA, 100 nt, Artificial Sequence; identical to SEQ ID NO: 404
  Synthetic

SEQ ID NO: 515 - RNA, 100 nt, Artificial Sequence; identical to SEQ ID NO: 404
  Synthetic

SEQ ID NO: 516 - RNA, 100 nt, Artificial Sequence; identical to SEQ ID NO: 404
  Synthetic

SEQ ID NO: 517 - RNA, 100 nt, Artificial Sequence
  Synthetic
acacaaauaccaguccagcgguuuuagagcuagaaauagcaaguuaaaauaaggcuaguccgugaucaacuugaaaaaguggcaccgagucggugcuuuu

SEQ ID NO: 518 - RNA, 100 nt, Artificial Sequence; identical to SEQ ID NO: 404
  Synthetic

SEQ ID NO: 519 - RNA, 100 nt, Artificial Sequence; identical to SEQ ID NO: 404
  Synthetic

SEQ ID NO: 520 - RNA, 100 nt, Artificial Sequence; identical to SEQ ID NO: 404
  Synthetic

SEQ ID NO: 521 - RNA, 100 nt, Artificial Sequence; identical to SEQ ID NO: 404
  Synthetic

SEQ ID NO: 522 - RNA, 100 nt, Artificial Sequence; identical to SEQ ID NO: 404
  Synthetic

SEQ ID NO: 523 - RNA, 100 nt, Artificial Sequence; identical to SEQ ID NO: 404
  Synthetic

SEQ ID NO: 524 - RNA, 100 nt, Artificial Sequence; identical to SEQ ID NO: 404
  Synthetic

SEQ ID NO: 525 - RNA, 100 nt, Artificial Sequence; identical to SEQ ID NO: 404
  Synthetic

SEQ ID NO: 526 - RNA, 100 nt, Artificial Sequence; identical to SEQ ID NO: 404
  Synthetic

SEQ ID NO: 527 - RNA, 100 nt, Artificial Sequence; identical to SEQ ID NO: 404
  Synthetic

SEQ ID NO: 528 - RNA, 100 nt, Artificial Sequence; identical to SEQ ID NO: 404
  Synthetic

SEQ ID NO: 529 - RNA, 100 nt, Artificial Sequence; identical to SEQ ID NO: 404
  Synthetic

SEQ ID NO: 530 - RNA, 100 nt, Artificial Sequence; identical to SEQ ID NO: 404
  Synthetic

SEQ ID NO: 531 - RNA, 100 nt, Artificial Sequence; identical to SEQ ID NO: 404
  Synthetic

SEQ ID NO: 532 - RNA, 100 nt, Artificial Sequence; identical to SEQ ID NO: 404
  Synthetic

SEQ ID NO: 533 - RNA, 100 nt, Artificial Sequence; identical to SEQ ID NO: 1
  Synthetic

SEQ ID NO: 534 - RNA, 100 nt, Artificial Sequence; identical to SEQ ID NO: 10
  Synthetic

SEQ ID NO: 535 - RNA, 100 nt, Artificial Sequence; identical to SEQ ID NO: 10
  Synthetic

SEQ ID NO: 536-600 - skipped (65 entries)

SEQ ID NO: 601 - RNA, 80 nt, Artificial Sequence; identical to SEQ ID NO: 201
  Synthetic

SEQ ID NO: 602-606 - skipped (5 entries)

SEQ ID NO: 607 - DNA, 80 bp, Artificial Sequence
  Synthetic
guuuuagagcuagaaauagcaaguuaaaauaaggcuaguccguuaucaacuugaaaaaguggcaccgagucggugcuttt

SEQ ID NO: 608 - DNA, 80 bp, Artificial Sequence
  Synthetic
guuuuagagcuagaaauagcaaguuaaaauaaggcuaguccguuaucaacuugaaaaaguggcaccgagtcggtgctttt

SEQ ID NO: 609 - DNA, 80 bp, Artificial Sequence
  Synthetic
guuuuagagcuagaaauagcaaguuaaaauaaggcuaguccguuaucaacttgaaaaagtggcaccgagtcggtgctttt

SEQ ID NO: 610 - DNA, 80 bp, Artificial Sequence
  Synthetic
guuuuagagctagaaatagcaaguuaaaauaaggcuaguccguuaucaacttgaaaaagtggcaccgagtcggtgctttt

SEQ ID NO: 611 - DNA, 80 bp, Artificial Sequence; identical to SEQ ID NO: 610
  Synthetic

SEQ ID NO: 612 - RNA, 80 nt, Artificial Sequence; identical to SEQ ID NO: 201
  Synthetic

SEQ ID NO: 613 - RNA, 80 nt, Artificial Sequence; identical to SEQ ID NO: 201
  Synthetic

SEQ ID NO: 614 - RNA, 80 nt, Artificial Sequence; identical to SEQ ID NO: 201
  Synthetic

SEQ ID NO: 615 - RNA, 80 nt, Artificial Sequence; identical to SEQ ID NO: 201
  Synthetic

SEQ ID NO: 616 - RNA, 80 nt, Artificial Sequence; identical to SEQ ID NO: 201
  Synthetic

SEQ ID NO: 617 - RNA, 80 nt, Artificial Sequence; identical to SEQ ID NO: 201
  Synthetic

SEQ ID NO: 618 - RNA, 80 nt, Artificial Sequence; identical to SEQ ID NO: 201
  Synthetic

SEQ ID NO: 619 - RNA, 80 nt, Artificial Sequence; identical to SEQ ID NO: 201
  Synthetic

SEQ ID NO: 620 - RNA, 80 nt, Artificial Sequence; identical to SEQ ID NO: 201
  Synthetic

SEQ ID NO: 621 - RNA, 80 nt, Artificial Sequence; identical to SEQ ID NO: 201
  Synthetic

SEQ ID NO: 622 - RNA, 80 nt, Artificial Sequence; identical to SEQ ID NO: 201
  Synthetic

SEQ ID NO: 623 - RNA, 80 nt, Artificial Sequence; identical to SEQ ID NO: 201
  Synthetic

SEQ ID NO: 624 - RNA, 80 nt, Artificial Sequence; identical to SEQ ID NO: 201
  Synthetic

SEQ ID NO: 625 - RNA, 80 nt, Artificial Sequence; identical to SEQ ID NO: 201
  Synthetic

SEQ ID NO: 626 - RNA, 80 nt, Artificial Sequence; identical to SEQ ID NO: 201
  Synthetic

SEQ ID NO: 627 - RNA, 80 nt, Artificial Sequence; identical to SEQ ID NO: 201
  Synthetic

SEQ ID NO: 628 - RNA, 80 nt, Artificial Sequence; identical to SEQ ID NO: 201
  Synthetic

SEQ ID NO: 629 - RNA, 80 nt, Artificial Sequence; identical to SEQ ID NO: 201
  Synthetic

SEQ ID NO: 630 - RNA, 80 nt, Artificial Sequence; identical to SEQ ID NO: 201
  Synthetic

SEQ ID NO: 631 - RNA, 80 nt, Artificial Sequence; identical to SEQ ID NO: 201
  Synthetic

SEQ ID NO: 632 - RNA, 80 nt, Artificial Sequence; identical to SEQ ID NO: 201
  Synthetic

SEQ ID NO: 633 - RNA, 80 nt, Artificial Sequence; identical to SEQ ID NO: 201
  Synthetic

SEQ ID NO: 634 - RNA, 80 nt, Artificial Sequence; identical to SEQ ID NO: 201
  Synthetic

SEQ ID NO: 635 - RNA, 80 nt, Artificial Sequence; identical to SEQ ID NO: 201
  Synthetic

SEQ ID NO: 636 - DNA, 80 bp, Artificial Sequence
  Synthetic
guuuuagagcuagaaauagcaaguuaaaauaaggcuaguccguuaucaacuugaaaaaguggcaccgagucggugctttu

SEQ ID NO: 637 - RNA, 80 nt, Artificial Sequence; identical to SEQ ID NO: 201
  Synthetic

SEQ ID NO: 638 - RNA, 80 nt, Artificial Sequence; identical to SEQ ID NO: 201
  Synthetic

SEQ ID NO: 639 - RNA, 80 nt, Artificial Sequence; identical to SEQ ID NO: 201
  Synthetic

SEQ ID NO: 640 - RNA, 80 nt, Artificial Sequence; identical to SEQ ID NO: 201
  Synthetic

SEQ ID NO: 641 - RNA, 80 nt, Artificial Sequence; identical to SEQ ID NO: 201
  Synthetic

SEQ ID NO: 642 - RNA, 80 nt, Artificial Sequence; identical to SEQ ID NO: 201
  Synthetic

SEQ ID NO: 643 - RNA, 80 nt, Artificial Sequence; identical to SEQ ID NO: 201
  Synthetic

SEQ ID NO: 644 - RNA, 80 nt, Artificial Sequence; identical to SEQ ID NO: 201
  Synthetic

SEQ ID NO: 645 - RNA, 80 nt, Artificial Sequence; identical to SEQ ID NO: 201
  Synthetic

SEQ ID NO: 646 - RNA, 80 nt, Artificial Sequence; identical to SEQ ID NO: 201
  Synthetic

SEQ ID NO: 647 - RNA, 80 nt, Artificial Sequence; identical to SEQ ID NO: 201
  Synthetic

SEQ ID NO: 648 - RNA, 80 nt, Artificial Sequence; identical to SEQ ID NO: 201
  Synthetic

SEQ ID NO: 649 - RNA, 80 nt, Artificial Sequence; identical to SEQ ID NO: 201
  Synthetic

SEQ ID NO: 650 - RNA, 80 nt, Artificial Sequence; identical to SEQ ID NO: 201
  Synthetic

SEQ ID NO: 651 - RNA, 80 nt, Artificial Sequence; identical to SEQ ID NO: 201
  Synthetic

SEQ ID NO: 652 - RNA, 80 nt, Artificial Sequence; identical to SEQ ID NO: 201
  Synthetic

SEQ ID NO: 653 - RNA, 80 nt, Artificial Sequence; identical to SEQ ID NO: 201
  Synthetic

SEQ ID NO: 654 - RNA, 80 nt, Artificial Sequence; identical to SEQ ID NO: 201
  Synthetic

SEQ ID NO: 655 - RNA, 80 nt, Artificial Sequence; identical to SEQ ID NO: 201
  Synthetic

SEQ ID NO: 656 - RNA, 80 nt, Artificial Sequence; identical to SEQ ID NO: 201
  Synthetic

SEQ ID NO: 657 - RNA, 80 nt, Artificial Sequence; identical to SEQ ID NO: 201
  Synthetic

SEQ ID NO: 658 - RNA, 80 nt, Artificial Sequence; identical to SEQ ID NO: 201
  Synthetic

SEQ ID NO: 659 - RNA, 80 nt, Artificial Sequence; identical to SEQ ID NO: 201
  Synthetic

SEQ ID NO: 660 - RNA, 80 nt, Artificial Sequence; identical to SEQ ID NO: 201
  Synthetic

SEQ ID NO: 661 - RNA, 80 nt, Artificial Sequence; identical to SEQ ID NO: 201
  Synthetic

SEQ ID NO: 662 - RNA, 80 nt, Artificial Sequence; identical to SEQ ID NO: 201
  Synthetic

SEQ ID NO: 663 - RNA, 80 nt, Artificial Sequence; identical to SEQ ID NO: 201
  Synthetic

SEQ ID NO: 664 - DNA, 80 bp, Artificial Sequence
  Synthetic
guuuuagagcuagaaauagcaagutaaaataaggcuaguccguuaucaacuugaaaaaguggcaccgagucggugcuuuu

SEQ ID NO: 665 - RNA, 80 nt, Artificial Sequence; identical to SEQ ID NO: 201
  Synthetic

SEQ ID NO: 666 - RNA, 80 nt, Artificial Sequence; identical to SEQ ID NO: 201
  Synthetic

SEQ ID NO: 667 - RNA, 80 nt, Artificial Sequence; identical to SEQ ID NO: 201
  Synthetic

SEQ ID NO: 668 - RNA, 80 nt, Artificial Sequence; identical to SEQ ID NO: 201
  Synthetic

SEQ ID NO: 669 - RNA, 80 nt, Artificial Sequence; identical to SEQ ID NO: 201
  Synthetic

SEQ ID NO: 670 - RNA, 80 nt, Artificial Sequence; identical to SEQ ID NO: 201
  Synthetic

SEQ ID NO: 671 - RNA, 80 nt, Artificial Sequence; identical to SEQ ID NO: 201
  Synthetic

SEQ ID NO: 672 - RNA, 80 nt, Artificial Sequence; identical to SEQ ID NO: 201
  Synthetic

SEQ ID NO: 673 - RNA, 80 nt, Artificial Sequence; identical to SEQ ID NO: 201
  Synthetic

SEQ ID NO: 674 - RNA, 80 nt, Artificial Sequence; identical to SEQ ID NO: 201
  Synthetic

SEQ ID NO: 675 - RNA, 80 nt, Artificial Sequence; identical to SEQ ID NO: 201
  Synthetic

SEQ ID NO: 676 - RNA, 80 nt, Artificial Sequence; identical to SEQ ID NO: 201
  Synthetic

SEQ ID NO: 677 - RNA, 80 nt, Artificial Sequence; identical to SEQ ID NO: 201
  Synthetic

SEQ ID NO: 678 - RNA, 80 nt, Artificial Sequence; identical to SEQ ID NO: 201
  Synthetic

SEQ ID NO: 679 - RNA, 80 nt, Artificial Sequence; identical to SEQ ID NO: 201
  Synthetic

SEQ ID NO: 680 - RNA, 80 nt, Artificial Sequence; identical to SEQ ID NO: 201
  Synthetic

SEQ ID NO: 681 - RNA, 80 nt, Artificial Sequence; identical to SEQ ID NO: 201
  Synthetic

SEQ ID NO: 682 - RNA, 80 nt, Artificial Sequence; identical to SEQ ID NO: 201
  Synthetic

SEQ ID NO: 683 - RNA, 80 nt, Artificial Sequence; identical to SEQ ID NO: 201
  Synthetic

SEQ ID NO: 684 - RNA, 80 nt, Artificial Sequence; identical to SEQ ID NO: 201
  Synthetic

SEQ ID NO: 685 - RNA, 80 nt, Artificial Sequence; identical to SEQ ID NO: 201
  Synthetic

SEQ ID NO: 686 - RNA, 80 nt, Artificial Sequence; identical to SEQ ID NO: 201
  Synthetic

SEQ ID NO: 687 - RNA, 80 nt, Artificial Sequence; identical to SEQ ID NO: 201
  Synthetic

SEQ ID NO: 688 - RNA, 80 nt, Artificial Sequence; identical to SEQ ID NO: 201
  Synthetic

SEQ ID NO: 689 - RNA, 80 nt, Artificial Sequence; identical to SEQ ID NO: 201
  Synthetic

SEQ ID NO: 690 - RNA, 80 nt, Artificial Sequence; identical to SEQ ID NO: 201
  Synthetic

SEQ ID NO: 691 - RNA, 80 nt, Artificial Sequence; identical to SEQ ID NO: 201
  Synthetic

SEQ ID NO: 692 - RNA, 80 nt, Artificial Sequence; identical to SEQ ID NO: 201
  Synthetic

SEQ ID NO: 693 - DNA, 80 bp, Artificial Sequence; identical to SEQ ID NO: 664
  Synthetic

SEQ ID NO: 694 - RNA, 80 nt, Artificial Sequence; identical to SEQ ID NO: 201
  Synthetic

SEQ ID NO: 695 - RNA, 80 nt, Artificial Sequence; identical to SEQ ID NO: 201
  Synthetic

SEQ ID NO: 696 - RNA, 80 nt, Artificial Sequence; identical to SEQ ID NO: 201
  Synthetic

SEQ ID NO: 697 - RNA, 80 nt, Artificial Sequence; identical to SEQ ID NO: 201
  Synthetic

SEQ ID NO: 698 - RNA, 80 nt, Artificial Sequence; identical to SEQ ID NO: 201
  Synthetic

SEQ ID NO: 699 - RNA, 80 nt, Artificial Sequence; identical to SEQ ID NO: 201
  Synthetic

SEQ ID NO: 700 - RNA, 80 nt, Artificial Sequence; identical to SEQ ID NO: 201
  Synthetic

SEQ ID NO: 701 - RNA, 80 nt, Artificial Sequence; identical to SEQ ID NO: 201
  Synthetic

SEQ ID NO: 702 - RNA, 80 nt, Artificial Sequence; identical to SEQ ID NO: 201
  Synthetic

SEQ ID NO: 703 - RNA, 80 nt, Artificial Sequence; identical to SEQ ID NO: 201
  Synthetic

SEQ ID NO: 704 - RNA, 80 nt, Artificial Sequence; identical to SEQ ID NO: 201
  Synthetic

SEQ ID NO: 705 - RNA, 80 nt, Artificial Sequence; identical to SEQ ID NO: 201
  Synthetic

SEQ ID NO: 706 - RNA, 80 nt, Artificial Sequence; identical to SEQ ID NO: 201
  Synthetic

SEQ ID NO: 707 - RNA, 80 nt, Artificial Sequence; identical to SEQ ID NO: 201
  Synthetic

SEQ ID NO: 708 - RNA, 80 nt, Artificial Sequence; identical to SEQ ID NO: 201
  Synthetic

SEQ ID NO: 709 - RNA, 80 nt, Artificial Sequence; identical to SEQ ID NO: 201
  Synthetic

SEQ ID NO: 710 - RNA, 80 nt, Artificial Sequence; identical to SEQ ID NO: 201
  Synthetic

SEQ ID NO: 711 - RNA, 80 nt, Artificial Sequence; identical to SEQ ID NO: 201
  Synthetic

SEQ ID NO: 712 - RNA, 80 nt, Artificial Sequence; identical to SEQ ID NO: 201
  Synthetic

SEQ ID NO: 713 - RNA, 80 nt, Artificial Sequence; identical to SEQ ID NO: 201
  Synthetic

SEQ ID NO: 714 - RNA, 80 nt, Artificial Sequence; identical to SEQ ID NO: 201
  Synthetic

SEQ ID NO: 715 - RNA, 80 nt, Artificial Sequence; identical to SEQ ID NO: 201
  Synthetic

SEQ ID NO: 716 - RNA, 80 nt, Artificial Sequence; identical to SEQ ID NO: 201
  Synthetic

SEQ ID NO: 717 - RNA, 80 nt, Artificial Sequence
  Synthetic
guuuuagagcuagaaauagcaaguuaaaauaaggcuaguccgugaucaacuugaaaaaguggcaccgagucggugcuuuu

SEQ ID NO: 718 - RNA, 80 nt, Artificial Sequence; identical to SEQ ID NO: 201
  Synthetic

SEQ ID NO: 719 - RNA, 80 nt, Artificial Sequence; identical to SEQ ID NO: 201
  Synthetic

SEQ ID NO: 720 - RNA, 80 nt, Artificial Sequence; identical to SEQ ID NO: 201
  Synthetic

SEQ ID NO: 721 - RNA, 80 nt, Artificial Sequence; identical to SEQ ID NO: 201
  Synthetic

SEQ ID NO: 722 - RNA, 80 nt, Artificial Sequence; identical to SEQ ID NO: 201
  Synthetic

SEQ ID NO: 723 - RNA, 80 nt, Artificial Sequence; identical to SEQ ID NO: 201
  Synthetic

SEQ ID NO: 724 - RNA, 80 nt, Artificial Sequence; identical to SEQ ID NO: 201
  Synthetic

SEQ ID NO: 725 - RNA, 80 nt, Artificial Sequence; identical to SEQ ID NO: 201
  Synthetic

SEQ ID NO: 726 - RNA, 80 nt, Artificial Sequence; identical to SEQ ID NO: 201
  Synthetic

SEQ ID NO: 727 - RNA, 80 nt, Artificial Sequence; identical to SEQ ID NO: 201
  Synthetic

SEQ ID NO: 728 - RNA, 80 nt, Artificial Sequence; identical to SEQ ID NO: 201
  Synthetic

SEQ ID NO: 729 - RNA, 80 nt, Artificial Sequence; identical to SEQ ID NO: 201
  Synthetic

SEQ ID NO: 730 - RNA, 80 nt, Artificial Sequence; identical to SEQ ID NO: 201
  Synthetic

SEQ ID NO: 731 - RNA, 80 nt, Artificial Sequence; identical to SEQ ID NO: 201
  Synthetic

SEQ ID NO: 732 - RNA, 80 nt, Artificial Sequence; identical to SEQ ID NO: 201
  Synthetic

SEQ ID NO: 733-800 - skipped (68 entries)

SEQ ID NO: 801 - RNA, 105 nt, Artificial Sequence
  Synthetic
  misc_feature (1)..(25): n is a, c, g, or u
  misc_feature (1)..(25): at least 5 n are present and 6-25 n may be present or absent
nnnnnnnnnnnnnnnnnnnnnnnnnguuuuagagcuagaaauagcaaguuaaaauaaggcuaguccguuaucaacuugaaaaaguggcaccgagucggugcuuuu

SEQ ID NO: 802-806 - skipped (5 entries)

SEQ ID NO: 807 - DNA, 105 bp, Artificial Sequence
  Synthetic
  misc_feature (1)..(25): n is a, c, g, t or u
  misc_feature (1)..(25): at least 5 n are present and 6-25 n may be present or absent
nnnnnnnnnnnnnnnnnnnnnnnnnguuuuagagcuagaaauagcaaguuaaaauaaggcuaguccguuaucaacuugaaaaaguggcaccgagucggugcuttt

SEQ ID NO: 808 - DNA, 105 bp, Artificial Sequence
  Synthetic
  misc_feature (1)..(25): n is a, c, g, t or u
  misc_feature (1)..(25): at least 5 n are present and 6-25 n may be present or absent
nnnnnnnnnnnnnnnnnnnnnnnnnguuuuagagcuagaaauagcaaguuaaaauaaggcuaguccguuaucaacuugaaaaaguggcaccgagtcggtgctttt

SEQ ID NO: 809 - DNA, 105 bp, Artificial Sequence
  Synthetic
  misc_feature (1)..(25): n is a, c, g, t or u
  misc_feature (1)..(25): at least 5 n are present and 6-25 n may be present or absent
nnnnnnnnnnnnnnnnnnnnnnnnnguuuuagagcuagaaauagcaaguuaaaauaaggcuaguccguuaucaacttgaaaaagtggcaccgagtcggtgctttt

SEQ ID NO: 810 - DNA, 105 bp, Artificial Sequence
  Synthetic
  misc_feature (1)..(25): n is a, c, g, t or u
  misc_feature (1)..(25): at least 5 n are present and 6-25 n may be present or absent
nnnnnnnnnnnnnnnnnnnnnnnnnguuuuagagctagaaatagcaaguuaaaauaaggcuaguccguuaucaacttgaaaaagtggcaccgagtcggtgctttt

SEQ ID NO: 811 - DNA, 105 bp, Artificial Sequence; identical to SEQ ID NO: 810
  Synthetic
  misc_feature (1)..(25): n is a, c, g, t or u
  misc_feature (1)..(25): at least 5 n are present and 6-25 n may be present or absent

SEQ ID NO: 812 - RNA, 105 nt, Artificial Sequence; identical to SEQ ID NO: 801
  Synthetic
  misc_feature (1)..(25): n is a, c, g, or u
  misc_feature (1)..(25): at least 5 n are present and 6-25 n may be present or absent

SEQ ID NO: 813 - RNA, 105 nt, Artificial Sequence; identical to SEQ ID NO: 801
  Synthetic
  misc_feature (1)..(25): n is a, c, g, or u
  misc_feature (1)..(25): at least 5 n are present and 6-25 n may be present or absent

SEQ ID NO: 814 - RNA, 105 nt, Artificial Sequence; identical to SEQ ID NO: 801
  Synthetic
  misc_feature (1)..(25): n is a, c, g, or u
  misc_feature (1)..(25): at least 5 n are present and 6-25 n may be present or absent

SEQ ID NO: 815 - RNA, 105 nt, Artificial Sequence; identical to SEQ ID NO: 801
  Synthetic
  misc_feature (1)..(25): n is a, c, g, or u
  misc_feature (1)..(25): at least 5 n are present and 6-25 n may be present or absent

SEQ ID NO: 816 - RNA, 105 nt, Artificial Sequence; identical to SEQ ID NO: 801
  Synthetic
  misc_feature (1)..(25): n is a, c, g, or u
  misc_feature (1)..(25): at least 5 n are present and 6-25 n may be present or absent

SEQ ID NO: 817 - RNA, 105 nt, Artificial Sequence; identical to SEQ ID NO: 801
  Synthetic
  misc_feature (1)..(25): n is a, c, g, or u
  misc_feature (1)..(25): at least 5 n are present and 6-25 n may be present or absent

SEQ ID NO: 818 - RNA, 105 nt, Artificial Sequence; identical to SEQ ID NO: 801
  Synthetic
  misc_feature (1)..(25): n is a, c, g, or u
  misc_feature (1)..(25): at least 5 n are present and 6-25 n may be present or absent

SEQ ID NO: 819 - RNA, 105 nt, Artificial Sequence; identical to SEQ ID NO: 801
  Synthetic
  misc_feature (1)..(25): n is a, c, g, or u
  misc_feature (1)..(25): at least 5 n are present and 6-25 n may be present or absent

SEQ ID NO: 820 - RNA, 105 nt, Artificial Sequence; identical to SEQ ID NO: 801
  Synthetic
  misc_feature (1)..(25): n is a, c, g, or u
  misc_feature (1)..(25): at least 5 n are present and 6-25 n may be present or absent

SEQ ID NO: 821 - RNA, 105 nt, Artificial Sequence; identical to SEQ ID NO: 801
  Synthetic
  misc_feature (1)..(25): n is a, c, g, or u
  misc_feature (1)..(25): at least 5 n are present and 6-25 n may be present or absent

SEQ ID NO: 822 - RNA, 105 nt, Artificial Sequence; identical to SEQ ID NO: 801
  Synthetic
  misc_feature (1)..(25): n is a, c, g, or u
  misc_feature (1)..(25): at least 5 n are present and 6-25 n may be present or absent

SEQ ID NO: 823 - RNA, 105 nt, Artificial Sequence; identical to SEQ ID NO: 801
  Synthetic
  misc_feature (1)..(25): n is a, c, g, or u
  misc_feature (1)..(25): at least 5 n are present and 6-25 n may be present or absent

SEQ ID NO: 824 - RNA, 105 nt, Artificial Sequence; identical to SEQ ID NO: 801
  Synthetic
  misc_feature (1)..(25): n is a, c, g, or u
  misc_feature (1)..(25): at least 5 n are present and 6-25 n may be present or absent

SEQ ID NO: 825 - RNA, 105 nt, Artificial Sequence; identical to SEQ ID NO: 801
  Synthetic
  misc_feature (1)..(25): n is a, c, g, or u
  misc_feature (1)..(25): at least 5 n are present and 6-25 n may be present or absent

SEQ ID NO: 826 - RNA, 105 nt, Artificial Sequence; identical to SEQ ID NO: 801
  Synthetic
  misc_feature (1)..(25): n is a, c, g, or u
  misc_feature (1)..(25): at least 5 n are present and 6-25 n may be present or absent

SEQ ID NO: 827 - RNA, 105 nt, Artificial Sequence; identical to SEQ ID NO: 801
  Synthetic
  misc_feature (1)..(25): n is a, c, g, or u
  misc_feature (1)..(25): at least 5 n are present and 6-25 n may be present or absent

SEQ ID NO: 828 - RNA, 105 nt, Artificial Sequence; identical to SEQ ID NO: 801
  Synthetic
  misc_feature (1)..(25): n is a, c, g, or u
  misc_feature (1)..(25): at least 5 n are present and 6-25 n may be present or absent

SEQ ID NO: 829 - RNA, 105 nt, Artificial Sequence; identical to SEQ ID NO: 801
  Synthetic
  misc_feature (1)..(25): n is a, c, g, or u
  misc_feature (1)..(25): at least 5 n are present and 6-25 n may be present or absent

SEQ ID NO: 830 - RNA, 105 nt, Artificial Sequence; identical to SEQ ID NO: 801
  Synthetic
  misc_feature (1)..(25): n is a, c, g, or u
  misc_feature (1)..(25): at least 5 n are present and 6-25 n may be present or absent

SEQ ID NO: 831 - RNA, 105 nt, Artificial Sequence; identical to SEQ ID NO: 801
  Synthetic
  misc_feature (1)..(25): n is a, c, g, or u
  misc_feature (1)..(25): at least 5 n are present and 6-25 n may be present or absent

SEQ ID NO: 832 - RNA, 105 nt, Artificial Sequence; identical to SEQ ID NO: 801
  Synthetic
  misc_feature (1)..(25): n is a, c, g, or u
  misc_feature (1)..(25): at least 5 n are present and 6-25 n may be present or absent

SEQ ID NO: 833 - RNA, 105 nt, Artificial Sequence; identical to SEQ ID NO: 801
  Synthetic
  misc_feature (1)..(25): n is a, c, g, or u
  misc_feature (1)..(25): at least 5 n are present and 6-25 n may be present or absent

SEQ ID NO: 834 - RNA, 105 nt, Artificial Sequence; identical to SEQ ID NO: 801
  Synthetic
  misc_feature (1)..(25): n is a, c, g, or u
  misc_feature (1)..(25): at least 5 n are present and 6-25 n may be present or absent

SEQ ID NO: 835 - RNA, 105 nt, Artificial Sequence; identical to SEQ ID NO: 801
  Synthetic
  misc_feature (1)..(25): n is a, c, g, or u
  misc_feature (1)..(25): at least 5 n are present and 6-25 n may be present or absent

SEQ ID NO: 836 - DNA, 105 bp, Artificial Sequence
  Synthetic
  misc_feature (1)..(25): n is a, c, g, t or u
  misc_feature (1)..(25): at least 5 n are present and 6-25 n may be present or absent
nnnnnnnnnnnnnnnnnnnnnnnnnguuuuagagcuagaaauagcaaguuaaaauaaggcuaguccguuaucaacuugaaaaaguggcaccgagucggugctttu

SEQ ID NO: 837 - RNA, 105 nt, Artificial Sequence; identical to SEQ ID NO: 801
  Synthetic
  misc_feature (1)..(25): n is a, c, g, or u
  misc_feature (1)..(25): at least 5 n are present and 6-25 n may be present or absent

SEQ ID NO: 838 - RNA, 105 nt, Artificial Sequence; identical to SEQ ID NO: 801
  Synthetic
  misc_feature (1)..(25): n is a, c, g, or u
  misc_feature (1)..(25): at least 5 n are present and 6-25 n may be present or absent

SEQ ID NO: 839 - RNA, 105 nt, Artificial Sequence; identical to SEQ ID NO: 801
  Synthetic
  misc_feature (1)..(25): n is a, c, g, or u
  misc_feature (1)..(25): at least 5 n are present and 6-25 n may be present or absent

SEQ ID NO: 840 - RNA, 105 nt, Artificial Sequence; identical to SEQ ID NO: 801
  Synthetic
  misc_feature (1)..(25): n is a, c, g, or u
  misc_feature (1)..(25): at least 5 n are present and 6-25 n may be present or absent

SEQ ID NO: 841 - RNA, 105 nt, Artificial Sequence; identical to SEQ ID NO: 801
  Synthetic
  misc_feature (1)..(25): n is a, c, g, or u
  misc_feature (1)..(25): at least 5 n are present and 6-25 n may be present or absent

SEQ ID NO: 842 - RNA, 105 nt, Artificial Sequence; identical to SEQ ID NO: 801
  Synthetic
  misc_feature (1)..(25): n is a, c, g, or u
  misc_feature (1)..(25): at least 5 n are present and 6-25 n may be present or absent

SEQ ID NO: 843 - RNA, 105 nt, Artificial Sequence; identical to SEQ ID NO: 801
  Synthetic
  misc_feature (1)..(25): n is a, c, g, or u
  misc_feature (1)..(25): at least 5 n are present and 6-25 n may be present or absent

SEQ ID NO: 844 - RNA, 105 nt, Artificial Sequence; identical to SEQ ID NO: 801
  Synthetic
  misc_feature (1)..(25): n is a, c, g, or u
  misc_feature (1)..(25): at least 5 n are present and 6-25 n may be present or absent

SEQ ID NO: 845 - RNA, 105 nt, Artificial Sequence; identical to SEQ ID NO: 801
  Synthetic
  misc_feature (1)..(25): n is a, c, g, or u
  misc_feature (1)..(25): at least 5 n are present and 6-25 n may be present or absent

SEQ ID NO: 846 - RNA, 105 nt, Artificial Sequence; identical to SEQ ID NO: 801
  Synthetic
  misc_feature (1)..(25): n is a, c, g, or u
  misc_feature (1)..(25): at least 5 n are present and 6-25 n may be present or absent

SEQ ID NO: 847 - RNA, 105 nt, Artificial Sequence; identical to SEQ ID NO: 801
  Synthetic
  misc_feature (1)..(25): n is a, c, g, or u
  misc_feature (1)..(25): at least 5 n are present and 6-25 n may be present or absent

SEQ ID NO: 848 - RNA, 105 nt, Artificial Sequence; identical to SEQ ID NO: 801
  Synthetic
  misc_feature (1)..(25): n is a, c, g, or u
  misc_feature (1)..(25): at least 5 n are present and 6-25 n may be present or absent

SEQ ID NO: 849 - RNA, 105 nt, Artificial Sequence; identical to SEQ ID NO: 801
  Synthetic
  misc_feature (1)..(25): n is a, c, g, or u
  misc_feature (1)..(25): at least 5 n are present and 6-25 n may be present or absent

SEQ ID NO: 850 - RNA, 105 nt, Artificial Sequence; identical to SEQ ID NO: 801
  Synthetic
  misc_feature (1)..(25): n is a, c, g, or u
  misc_feature (1)..(25): at least 5 n are present and 6-25 n may be present or absent

SEQ ID NO: 851 - RNA, 105 nt, Artificial Sequence; identical to SEQ ID NO: 801
  Synthetic
  misc_feature (1)..(25): n is a, c, g, or u
  misc_feature (1)..(25): at least 5 n are present and 6-25 n may be present or absent

SEQ ID NO: 852 - RNA, 105 nt, Artificial Sequence; identical to SEQ ID NO: 801
  Synthetic
  misc_feature (1)..(25): n is a, c, g, or u
  misc_feature (1)..(25): at least 5 n are present and 6-25 n may be present or absent

SEQ ID NO: 853 - RNA, 105 nt, Artificial Sequence; identical to SEQ ID NO: 801
  Synthetic
  misc_feature (1)..(25): n is a, c, g, or u
  misc_feature (1)..(25): at least 5 n are present and 6-25 n may be present or absent

SEQ ID NO: 854 - RNA, 105 nt, Artificial Sequence; identical to SEQ ID NO: 801
  Synthetic
  misc_feature (1)..(25): n is a, c, g, or u
  misc_feature (1)..(25): at least 5 n are present and 6-25 n may be present or absent

SEQ ID NO: 855 - RNA, 105 nt, Artificial Sequence; identical to SEQ ID NO: 801
  Synthetic
  misc_feature (1)..(25): n is a, c, g, or u
  misc_feature (1)..(25): at least 5 n are present and 6-25 n may be present or absent

SEQ ID NO: 856 - RNA, 105 nt, Artificial Sequence; identical to SEQ ID NO: 801
  Synthetic
  misc_feature (1)..(25): n is a, c, g, or u
  misc_feature (1)..(25): at least 5 n are present and 6-25 n may be present or absent

SEQ ID NO: 857 - RNA, 105 nt, Artificial Sequence; identical to SEQ ID NO: 801
  Synthetic
  misc_feature (1)..(25): n is a, c, g, or u
  misc_feature (1)..(25): at least 5 n are present and 6-25 n may be present or absent

SEQ ID NO: 858 - RNA, 105 nt, Artificial Sequence; identical to SEQ ID NO: 801
  Synthetic
  misc_feature (1)..(25): n is a, c, g, or u
  misc_feature (1)..(25): at least 5 n are present and 6-25 n may be present or absent

SEQ ID NO: 859 - RNA, 105 nt, Artificial Sequence; identical to SEQ ID NO: 801
  Synthetic
  misc_feature (1)..(25): n is a, c, g, or u
  misc_feature (1)..(25): at least 5 n are present and 6-25 n may be present or absent

SEQ ID NO: 860 - RNA, 105 nt, Artificial Sequence; identical to SEQ ID NO: 801
  Synthetic
  misc_feature (1)..(25): n is a, c, g, or u
  misc_feature (1)..(25): at least 5 n are present and 6-25 n may be present or absent

SEQ ID NO: 861 - RNA, 105 nt, Artificial Sequence; identical to SEQ ID NO: 801
  Synthetic
  misc_feature (1)..(25): n is a, c, g, or u
  misc_feature (1)..(25): at least 5 n are present and 6-25 n may be present or absent

SEQ ID NO: 862 - RNA, 105 nt, Artificial Sequence; identical to SEQ ID NO: 801
  Synthetic
  misc_feature (1)..(25): n is a, c, g, or u
  misc_feature (1)..(25): at least 5 n are present and 6-25 n may be present or absent

SEQ ID NO: 863 - RNA, 105 nt, Artificial Sequence; identical to SEQ ID NO: 801
  Synthetic
  misc_feature (1)..(25): n is a, c, g, or u
  misc_feature (1)..(25): at least 5 n are present and 6-25 n may be present or absent

SEQ ID NO: 864 - DNA, 105 bp, Artificial Sequence
  Synthetic
  misc_feature (1)..(25): n is a, c, g, t or u
  misc_feature (1)..(25): at least 5 n are present and 6-25 n may be present or absent
nnnnnnnnnnnnnnnnnnnnnnnnnguuuuagagcuagaaauagcaagutaaaataaggcuaguccguuaucaacuugaaaaaguggcaccgagucggugcuuuu

SEQ ID NO: 865 - RNA, 105 nt, Artificial Sequence; identical to SEQ ID NO: 801
  Synthetic
  misc_feature (1)..(25): n is a, c, g, or u
  misc_feature (1)..(25): at least 5 n are present and 6-25 n may be present or absent

SEQ ID NO: 866 - RNA, 105 nt, Artificial Sequence; identical to SEQ ID NO: 801
  Synthetic
  misc_feature (1)..(25): n is a, c, g, or u
  misc_feature (1)..(25): at least 5 n are present and 6-25 n may be present or absent

SEQ ID NO: 867 - RNA, 105 nt, Artificial Sequence; identical to SEQ ID NO: 801
  Synthetic
  misc_feature (1)..(25): n is a, c, g, or u
  misc_feature (1)..(25): at least 5 n are present and 6-25 n may be present or absent

SEQ ID NO: 868 - RNA, 105 nt, Artificial Sequence; identical to SEQ ID NO: 801
  Synthetic
  misc_feature (1)..(25): n is a, c, g, or u
  misc_feature (1)..(25): at least 5 n are present and 6-25 n may be present or absent

SEQ ID NO: 869 - RNA, 105 nt, Artificial Sequence; identical to SEQ ID NO: 801
  Synthetic
  misc_feature (1)..(25): n is a, c, g, or u
  misc_feature (1)..(25): at least 5 n are present and 6-25 n may be present or absent

SEQ ID NO: 870 - RNA, 105 nt, Artificial Sequence; identical to SEQ ID NO: 801
  Synthetic
  misc_feature (1)..(25): n is a, c, g, or u
  misc_feature (1)..(25): at least 5 n are present and 6-25 n may be present or absent

SEQ ID NO: 871 - RNA, 105 nt, Artificial Sequence; identical to SEQ ID NO: 801
  Synthetic
  misc_feature (1)..(25): n is a, c, g, or u
  misc_feature (1)..(25): at least 5 n are present and 6-25 n may be present or absent

SEQ ID NO: 872 - RNA, 105 nt, Artificial Sequence; identical to SEQ ID NO: 801
  Synthetic
  misc_feature (1)..(25): n is a, c, g, or u
  misc_feature (1)..(25): at least 5 n are present and 6-25 n may be present or absent

SEQ ID NO: 873 - RNA, 105 nt, Artificial Sequence; identical to SEQ ID NO: 801
  Synthetic
  misc_feature (1)..(25): n is a, c, g, or u
  misc_feature (1)..(25): at least 5 n are present and 6-25 n may be present or absent

SEQ ID NO: 874 - RNA, 105 nt, Artificial Sequence; identical to SEQ ID NO: 801
  Synthetic
  misc_feature (1)..(25): n is a, c, g, or u
  misc_feature (1)..(25): at least 5 n are present and 6-25 n may be present or absent

SEQ ID NO: 875 - RNA, 105 nt, Artificial Sequence; identical to SEQ ID NO: 801
  Synthetic
  misc_feature (1)..(25): n is a, c, g, or u
  misc_feature (1)..(25): at least 5 n are present and 6-25 n may be present or absent

SEQ ID NO: 876 - RNA, 105 nt, Artificial Sequence; identical to SEQ ID NO: 801
  Synthetic
  misc_feature (1)..(25): n is a, c, g, or u
  misc_feature (1)..(25): at least 5 n are present and 6-25 n may be present or absent

SEQ ID NO: 877 - RNA, 105 nt, Artificial Sequence; identical to SEQ ID NO: 801
  Synthetic
  misc_feature (1)..(25): n is a, c, g, or u
  misc_feature (1)..(25): at least 5 n are present and 6-25 n may be present or absent

SEQ ID NO: 878 - RNA, 105 nt, Artificial Sequence; identical to SEQ ID NO: 801
  Synthetic
  misc_feature (1)..(25): n is a, c, g, or u
  misc_feature (1)..(25): at least 5 n are present and 6-25 n may be present or absent

SEQ ID NO: 879 - RNA, 105 nt, Artificial Sequence; identical to SEQ ID NO: 801
  Synthetic
  misc_feature (1)..(25): n is a, c, g, or u
  misc_feature (1)..(25): at least 5 n are present and 6-25 n may be present or absent

SEQ ID NO: 880 - RNA, 105 nt, Artificial Sequence; identical to SEQ ID NO: 801
  Synthetic
  misc_feature (1)..(25): n is a, c, g, or u
  misc_feature (1)..(25): at least 5 n are present and 6-25 n may be present or absent

SEQ ID NO: 881 - RNA, 105 nt, Artificial Sequence; identical to SEQ ID NO: 801
  Synthetic
  misc_feature (1)..(25): n is a, c, g, or u
  misc_feature (1)..(25): at least 5 n are present and 6-25 n may be present or absent

SEQ ID NO: 882 - RNA, 105 nt, Artificial Sequence; identical to SEQ ID NO: 801
  Synthetic
  misc_feature (1)..(25): n is a, c, g, or u
  misc_feature (1)..(25): at least 5 n are present and 6-25 n may be present or absent

SEQ ID NO: 883 - RNA, 105 nt, Artificial Sequence; identical to SEQ ID NO: 801
  Synthetic
  misc_feature (1)..(25): n is a, c, g, or u
  misc_feature (1)..(25): at least 5 n are present and 6-25 n may be present or absent

SEQ ID NO: 884 - RNA, 105 nt, Artificial Sequence; identical to SEQ ID NO: 801
  Synthetic
  misc_feature (1)..(25): n is a, c, g, or u
  misc_feature (1)..(25): at least 5 n are present and 6-25 n may be present or absent

SEQ ID NO: 885 - RNA, 105 nt, Artificial Sequence; identical to SEQ ID NO: 801
  Synthetic
  misc_feature (1)..(25): n is a, c, g, or u
  misc_feature (1)..(25): at least 5 n are present and 6-25 n may be present or absent

SEQ ID NO: 886 - RNA, 105 nt, Artificial Sequence; identical to SEQ ID NO: 801
  Synthetic
  misc_feature (1)..(25): n is a, c, g, or u
  misc_feature (1)..(25): at least 5 n are present and 6-25 n may be present or absent

SEQ ID NO: 887 - RNA, 105 nt, Artificial Sequence; identical to SEQ ID NO: 801
  Synthetic
  misc_feature (1)..(25): n is a, c, g, or u
  misc_feature (1)..(25): at least 5 n are present and 6-25 n may be present or absent

SEQ ID NO: 888 - RNA, 105 nt, Artificial Sequence; identical to SEQ ID NO: 801
  Synthetic
  misc_feature (1)..(25): n is a, c, g, or u
  misc_feature (1)..(25): at least 5 n are present and 6-25 n may be present or absent

SEQ ID NO: 889 - RNA, 105 nt, Artificial Sequence; identical to SEQ ID NO: 801
  Synthetic
  misc_feature (1)..(25): n is a, c, g, or u
  misc_feature (1)..(25): at least 5 n are present and 6-25 n may be present or absent

SEQ ID NO: 890 - RNA, 105 nt, Artificial Sequence; identical to SEQ ID NO: 801
  Synthetic
  misc_feature (1)..(25): n is a, c, g, or u
  misc_feature (1)..(25): at least 5 n are present and 6-25 n may be present or absent

SEQ ID NO: 891 - RNA, 105 nt, Artificial Sequence; identical to SEQ ID NO: 801
  Synthetic
  misc_feature (1)..(25): n is a, c, g, or u
  misc_feature (1)..(25): at least 5 n are present and 6-25 n may be present or absent

SEQ ID NO: 892 - RNA, 105 nt, Artificial Sequence; identical to SEQ ID NO: 801
  Synthetic
  misc_feature (1)..(25): n is a, c, g, or u
  misc_feature (1)..(25): at least 5 n are present and 6-25 n may be present or absent

SEQ ID NO: 893 - DNA, 105 bp, Artificial Sequence; identical to SEQ ID NO: 864
  Synthetic
  misc_feature (1)..(25): n is a, c, g, t or u
  misc_feature (1)..(25): at least 5 n are present and 6-25 n may be present or absent

SEQ ID NO: 894 - RNA, 105 nt, Artificial Sequence; identical to SEQ ID NO: 801
  Synthetic
  misc_feature (1)..(25): n is a, c, g, or u
  misc_feature (1)..(25): at least 5 n are present and 6-25 n may be present or absent

SEQ ID NO: 895 - RNA, 105 nt, Artificial Sequence; identical to SEQ ID NO: 801
  Synthetic
  misc_feature (1)..(25): n is a, c, g, or u
  misc_feature (1)..(25): at least 5 n are present and 6-25 n may be present or absent

SEQ ID NO: 896 - RNA, 105 nt, Artificial Sequence; identical to SEQ ID NO: 801
  Synthetic
  misc_feature (1)..(25): n is a, c, g, or u
  misc_feature (1)..(25): at least 5 n are present and 6-25 n may be present or absent

SEQ ID NO: 897 - RNA, 105 nt, Artificial Sequence; identical to SEQ ID NO: 801
  Synthetic
  misc_feature (1)..(25): n is a, c, g, or u
  misc_feature (1)..(25): at least 5 n are present and 6-25 n may be present or absent

SEQ ID NO: 898 - RNA, 105 nt, Artificial Sequence; identical to SEQ ID NO: 801
  Synthetic
  misc_feature (1)..(25): n is a, c, g, or u
  misc_feature (1)..(25): at least 5 n are present and 6-25 n may be present or absent

SEQ ID NO: 899 - RNA, 105 nt, Artificial Sequence; identical to SEQ ID NO: 801
  Synthetic
  misc_feature (1)..(25): n is a, c, g, or u
  misc_feature (1)..(25): at least 5 n are present and 6-25 n may be present or absent

SEQ ID NO: 900 - RNA, 105 nt, Artificial Sequence; identical to SEQ ID NO: 801
  Synthetic
  misc_feature (1)..(25): n is a, c, g, or u
  misc_feature (1)..(25): at least 5 n are present and 6-25 n may be present or absent

SEQ ID NO: 901 - RNA, 105 nt, Artificial Sequence; identical to SEQ ID NO: 801
  Synthetic
  misc_feature (1)..(25): n is a, c, g, or u
  misc_feature (1)..(25): at least 5 n are present and 6-25 n may be present or absent

SEQ ID NO: 902 - RNA, 105 nt, Artificial Sequence; identical to SEQ ID NO: 801
  Synthetic
  misc_feature (1)..(25): n is a, c, g, or u
  misc_feature (1)..(25): at least 5 n are present and 6-25 n may be present or absent

SEQ ID NO: 903 - RNA, 105 nt, Artificial Sequence; identical to SEQ ID NO: 801
  Synthetic
  misc_feature (1)..(25): n is a, c, g, or u
  misc_feature (1)..(25): at least 5 n are present and 6-25 n may be present or absent

SEQ ID NO: 904 - RNA, 105 nt, Artificial Sequence; identical to SEQ ID NO: 801
  Synthetic
  misc_feature (1)..(25): n is a, c, g, or u
  misc_feature (1)..(25): at least 5 n are present and 6-25 n may be present or absent

SEQ ID NO: 905 - RNA, 105 nt, Artificial Sequence; identical to SEQ ID NO: 801
  Synthetic
  misc_feature (1)..(25): n is a, c, g, or u
  misc_feature (1)..(25): at least 5 n are present and 6-25 n may be present or absent

SEQ ID NO: 906 - RNA, 105 nt, Artificial Sequence; identical to SEQ ID NO: 801
  Synthetic
  misc_feature (1)..(25): n is a, c, g, or u
  misc_feature (1)..(25): at least 5 n are present and 6-25 n may be present or absent

SEQ ID NO: 907 - RNA, 105 nt, Artificial Sequence; identical to SEQ ID NO: 801
  Synthetic
  misc_feature (1)..(25): n is a, c, g, or u
  misc_feature (1)..(25): at least 5 n are present and 6-25 n may be present or absent

SEQ ID NO: 908 - RNA, 105 nt, Artificial Sequence; identical to SEQ ID NO: 801
  Synthetic
  misc_feature (1)..(25): n is a, c, g, or u
  misc_feature (1)..(25): at least 5 n are present and 6-25 n may be present or absent

SEQ ID NO: 909 - RNA, 105 nt, Artificial Sequence; identical to SEQ ID NO: 801
  Synthetic
  misc_feature (1)..(25): n is a, c, g, or u
  misc_feature (1)..(25): at least 5 n are present and 6-25 n may be present or absent

SEQ ID NO: 910 - RNA, 105 nt, Artificial Sequence; identical to SEQ ID NO: 801
  Synthetic
  misc_feature (1)..(25): n is a, c, g, or u
  misc_feature (1)..(25): at least 5 n are present and 6-25 n may be present or absent

SEQ ID NO: 911 - RNA, 105 nt, Artificial Sequence; identical to SEQ ID NO: 801
  Synthetic
  misc_feature (1)..(25): n is a, c, g, or u
  misc_feature (1)..(25): at least 5 n are present and 6-25 n may be present or absent

SEQ ID NO: 912 - RNA, 105 nt, Artificial Sequence; identical to SEQ ID NO: 801
  Synthetic
  misc_feature (1)..(25): n is a, c, g, or u
  misc_feature (1)..(25): at least 5 n are present and 6-25 n may be present or absent

SEQ ID NO: 913 - RNA, 105 nt, Artificial Sequence; identical to SEQ ID NO: 801
  Synthetic
  misc_feature (1)..(25): n is a, c, g, or u
  misc_feature (1)..(25): at least 5 n are present and 6-25 n may be present or absent

SEQ ID NO: 914 - RNA, 105 nt, Artificial Sequence; identical to SEQ ID NO: 801
  Synthetic
  misc_feature (1)..(25): n is a, c, g, or u
  misc_feature (1)..(25): at least 5 n are present and 6-25 n may be present or absent

SEQ ID NO: 915 - RNA, 105 nt, Artificial Sequence; identical to SEQ ID NO: 801
  Synthetic
  misc_feature (1)..(25): n is a, c, g, or u
  misc_feature (1)..(25): at least 5 n are present and 6-25 n may be present or absent

SEQ ID NO: 916 - RNA, 105 nt, Artificial Sequence; identical to SEQ ID NO: 801
  Synthetic
  misc_feature (1)..(25): n is a, c, g, or u
  misc_feature (1)..(25): at least 5 n are present and 6-25 n may be present or absent

SEQ ID NO: 917 - RNA, 105 nt, Artificial Sequence
  Synthetic
  misc_feature (1)..(25): n is a, c, g, or u
  misc_feature (1)..(25): at least 5 n are present and 6-25 n may be present or absent
nnnnnnnnnnnnnnnnnnnnnnnnnguuuuagagcuagaaauagcaaguuaaaauaaggcuaguccgugaucaacuugaaaaaguggcaccgagucggugcuuuu

SEQ ID NO: 918 - RNA, 105 nt, Artificial Sequence; identical to SEQ ID NO: 801
  Synthetic
  misc_feature (1)..(25): n is a, c, g, or u
  misc_feature (1)..(25): at least 5 n are present and 6-25 n may be present or absent

SEQ ID NO: 919 - RNA, 105 nt, Artificial Sequence; identical to SEQ ID NO: 801
  Synthetic
  misc_feature (1)..(25): n is a, c, g, or u
  misc_feature (1)..(25): at least 5 n are present and 6-25 n may be present or absent

SEQ ID NO: 920 - RNA, 105 nt, Artificial Sequence; identical to SEQ ID NO: 801
  Synthetic
  misc_feature (1)..(25): n is a, c, g, or u
  misc_feature (1)..(25): at least 5 n are present and 6-25 n may be present or absent

SEQ ID NO: 921 - RNA, 105 nt, Artificial Sequence; identical to SEQ ID NO: 801
  Synthetic
  misc_feature (1)..(25): n is a, c, g, or u
  misc_feature (1)..(25): at least 5 n are present and 6-25 n may be present or absent

SEQ ID NO: 922 - RNA, 105 nt, Artificial Sequence; identical to SEQ ID NO: 801
  Synthetic
  misc_feature (1)..(25): n is a, c, g, or u
  misc_feature (1)..(25): at least 5 n are present and 6-25 n may be present or absent

SEQ ID NO: 923 - RNA, 105 nt, Artificial Sequence; identical to SEQ ID NO: 801
  Synthetic
  misc_feature (1)..(25): n is a, c, g, or u
  misc_feature (1)..(25): at least 5 n are present and 6-25 n may be present or absent

SEQ ID NO: 924 - RNA, 105 nt, Artificial Sequence; identical to SEQ ID NO: 801
  Synthetic
  misc_feature (1)..(25): n is a, c, g, or u
  misc_feature (1)..(25): at least 5 n are present and 6-25 n may be present or absent

SEQ ID NO: 925 - RNA, 105 nt, Artificial Sequence; identical to SEQ ID NO: 801
  Synthetic
  misc_feature (1)..(25): n is a, c, g, or u
  misc_feature (1)..(25): at least 5 n are present and 6-25 n may be present or absent

SEQ ID NO: 926 - RNA, 105 nt, Artificial Sequence; identical to SEQ ID NO: 801
  Synthetic
  misc_feature (1)..(25): n is a, c, g, or u
  misc_feature (1)..(25): at least 5 n are present and 6-25 n may be present or absent

SEQ ID NO: 927 - RNA, 105 nt, Artificial Sequence; identical to SEQ ID NO: 801
  Synthetic
  misc_feature (1)..(25): n is a, c, g, or u
  misc_feature (1)..(25): at least 5 n are present and 6-25 n may be present or absent

SEQ ID NO: 928 - RNA, 105 nt, Artificial Sequence; identical to SEQ ID NO: 801
  Synthetic
  misc_feature (1)..(25): n is a, c, g, or u
  misc_feature (1)..(25): at least 5 n are present and 6-25 n may be present or absent

SEQ ID NO: 929 - RNA, 105 nt, Artificial Sequence; identical to SEQ ID NO: 801
  Synthetic
  misc_feature (1)..(25): n is a, c, g, or u
  misc_feature (1)..(25): at least 5 n are present and 6-25 n may be present or absent

SEQ ID NO: 930 - RNA, 105 nt, Artificial Sequence; identical to SEQ ID NO: 801
  Synthetic
  misc_feature (1)..(25): n is a, c, g, or u
  misc_feature (1)..(25): at least 5 n are present and 6-25 n may be present or absent

SEQ ID NO: 931 - RNA, 105 nt, Artificial Sequence; identical to SEQ ID NO: 801
  Synthetic
  misc_feature (1)..(25): n is a, c, g, or u
  misc_feature (1)..(25): at least 5 n are present and 6-25 n may be present or absent

SEQ ID NO: 932 - RNA, 105 nt, Artificial Sequence; identical to SEQ ID NO: 801
  Synthetic
  misc_feature (1)..(25): n is a, c, g, or u
  misc_feature (1)..(25): at least 5 n are present and 6-25 n may be present or absent

SEQ ID NO: 933-1006 - skipped (74 entries)

SEQ ID NO: 1007 - DNA, 100 bp, Artificial Sequence
  Synthetic
  misc_feature (1)..(20): n is a, c, g, t or u
nnnnnnnnnnnnnnnnnnnnguuuuagagcuagaaauagcaaguuaaaauaaggcuaguccguuaucaacuugaaaaaguggcaccgagucggugcuttt

SEQ ID NO: 1008 - DNA, 100 bp, Artificial Sequence
  Synthetic
  misc_feature (1)..(20): n is a, c, g, t or u
nnnnnnnnnnnnnnnnnnnnguuuuagagcuagaaauagcaaguuaaaauaaggcuaguccguuaucaacuugaaaaaguggcaccgagtcggtgctttt

SEQ ID NO: 1009 - DNA, 100 bp, Artificial Sequence
  Synthetic
  misc_feature (1)..(20): n is a, c, g, t or u
nnnnnnnnnnnnnnnnnnnnguuuuagagcuagaaauagcaaguuaaaauaaggcuaguccguuaucaacttgaaaaagtggcaccgagtcggtgctttt

SEQ ID NO: 1010 - DNA, 100 bp, Artificial Sequence
  Synthetic
  misc_feature (1)..(20): n is a, c, g, t or u
nnnnnnnnnnnnnnnnnnnnguuuuagagctagaaatagcaaguuaaaauaaggcuaguccguuaucaacttgaaaaagtggcaccgagtcggtgctttt

SEQ ID NO: 1011 - DNA, 100 bp, Artificial Sequence; identical to SEQ ID NO: 1010
  Synthetic
  misc_feature (1)..(20): n is a, c, g, t or u

SEQ ID NO: 1012 - RNA, 100 nt, Artificial Sequence
  Synthetic
  misc_feature (1)..(20): n is a, c, g, or u
nnnnnnnnnnnnnnnnnnnnguuuuagagcuagaaauagcaaguuaaaauaaggcuaguccguuaucaacuugaaaaaguggcaccgagucggugcuuuu

SEQ ID NO: 1013 - RNA, 100 nt, Artificial Sequence; identical to SEQ ID NO: 1012
  Synthetic
  misc_feature (1)..(20): n is a, c, g, or u

SEQ ID NO: 1014 - RNA, 100 nt, Artificial Sequence; identical to SEQ ID NO: 1012
  Synthetic
  misc_feature (1)..(20): n is a, c, g, or u

SEQ ID NO: 1015 - RNA, 100 nt, Artificial Sequence; identical to SEQ ID NO: 1012
  Synthetic
  misc_feature (1)..(20): n is a, c, g, or u

SEQ ID NO: 1016 - RNA, 100 nt, Artificial Sequence; identical to SEQ ID NO: 1012
  Synthetic
  misc_feature (1)..(20): n is a, c, g, or u

SEQ ID NO: 1017 - RNA, 100 nt, Artificial Sequence; identical to SEQ ID NO: 1012
  Synthetic
  misc_feature (1)..(20): n is a, c, g, or u

SEQ ID NO: 1018 - RNA, 100 nt, Artificial Sequence; identical to SEQ ID NO: 1012
  Synthetic
  misc_feature (1)..(20): n is a, c, g, or u

SEQ ID NO: 1019 - RNA, 100 nt, Artificial Sequence; identical to SEQ ID NO: 1012
  Synthetic
  misc_feature (1)..(20): n is a, c, g, or u

SEQ ID NO: 1020 - RNA, 100 nt, Artificial Sequence; identical to SEQ ID NO: 1012
  Synthetic
  misc_feature (1)..(20): n is a, c, g, or u

SEQ ID NO: 1021 - RNA, 100 nt, Artificial Sequence; identical to SEQ ID NO: 1012
  Synthetic
  misc_feature (1)..(20): n is a, c, g, or u

SEQ ID NO: 1022 - RNA, 100 nt, Artificial Sequence; identical to SEQ ID NO: 1012
  Synthetic
  misc_feature (1)..(20): n is a, c, g, or u

SEQ ID NO: 1023 - RNA, 100 nt, Artificial Sequence; identical to SEQ ID NO: 1012
  Synthetic
  misc_feature (1)..(20): n is a, c, g, or u

SEQ ID NO: 1024 - RNA, 100 nt, Artificial Sequence; identical to SEQ ID NO: 1012
  Synthetic
  misc_feature (1)..(20): n is a, c, g, or u

SEQ ID NO: 1025 - RNA, 100 nt, Artificial Sequence; identical to SEQ ID NO: 1012
  Synthetic
  misc_feature (1)..(20): n is a, c, g, or u

SEQ ID NO: 1026 - RNA, 100 nt, Artificial Sequence; identical to SEQ ID NO: 1012
  Synthetic
  misc_feature (1)..(20): n is a, c, g, or u

SEQ ID NO: 1027 - RNA, 100 nt, Artificial Sequence; identical to SEQ ID NO: 1012
  Synthetic
  misc_feature (1)..(20): n is a, c, g, or u

SEQ ID NO: 1028 - RNA, 100 nt, Artificial Sequence; identical to SEQ ID NO: 1012
  Synthetic
  misc_feature (1)..(20): n is a, c, g, or u

SEQ ID NO: 1029 - RNA, 100 nt, Artificial Sequence; identical to SEQ ID NO: 1012
  Synthetic
  misc_feature (1)..(20): n is a, c, g, or u

SEQ ID NO: 1030 - RNA, 100 nt, Artificial Sequence; identical to SEQ ID NO: 1012
  Synthetic
  misc_feature (1)..(20): n is a, c, g, or u

SEQ ID NO: 1031 - RNA, 100 nt, Artificial Sequence; identical to SEQ ID NO: 1012
  Synthetic
  misc_feature (1)..(20): n is a, c, g, or u

SEQ ID NO: 1032 - RNA, 100 nt, Artificial Sequence; identical to SEQ ID NO: 1012
  Synthetic
  misc_feature (1)..(20): n is a, c, g, or u

SEQ ID NO: 1033 - RNA, 100 nt, Artificial Sequence; identical to SEQ ID NO: 1012
  Synthetic
  misc_feature (1)..(20): n is a, c, g, or u

SEQ ID NO: 1034 - RNA, 100 nt, Artificial Sequence; identical to SEQ ID NO: 1012
  Synthetic
  misc_feature (1)..(20): n is a, c, g, or u

SEQ ID NO: 1035 - RNA, 100 nt, Artificial Sequence; identical to SEQ ID NO: 1012
  Synthetic
  misc_feature (1)..(20): n is a, c, g, or u

SEQ ID NO: 1036 - DNA, 100 bp, Artificial Sequence
  Synthetic
  misc_feature (1)..(20): n is a, c, g, t or u
nnnnnnnnnnnnnnnnnnnnguuuuagagcuagaaauagcaaguuaaaauaaggcuaguccguuaucaacuugaaaaaguggcaccgagucggugctttu

SEQ ID NO: 1037 - RNA, 100 nt, Artificial Sequence; identical to SEQ ID NO: 1012
  Synthetic
  misc_feature (1)..(20): n is a, c, g, or u

SEQ ID NO: 1038 - RNA, 100 nt, Artificial Sequence; identical to SEQ ID NO: 1012
  Synthetic
  misc_feature (1)..(20): n is a, c, g, or u

SEQ ID NO: 1039 - RNA, 100 nt, Artificial Sequence; identical to SEQ ID NO: 1012
  Synthetic
  misc_feature (1)..(20): n is a, c, g, or u

SEQ ID NO: 1040 - RNA, 100 nt, Artificial Sequence; identical to SEQ ID NO: 1012
  Synthetic
  misc_feature (1)..(20): n is a, c, g, or u

SEQ ID NO: 1041 - RNA, 100 nt, Artificial Sequence; identical to SEQ ID NO: 1012
  Synthetic
  misc_feature (1)..(20): n is a, c, g, or u

SEQ ID NO: 1042 - RNA, 100 nt, Artificial Sequence; identical to SEQ ID NO: 1012
  Synthetic
  misc_feature (1)..(20): n is a, c, g, or u

SEQ ID NO: 1043 - RNA, 100 nt, Artificial Sequence; identical to SEQ ID NO: 1012
  Synthetic
  misc_feature (1)..(20): n is a, c, g, or u

SEQ ID NO: 1044 - RNA, 100 nt, Artificial Sequence; identical to SEQ ID NO: 1012
  Synthetic
  misc_feature (1)..(20): n is a, c, g, or u

SEQ ID NO: 1045 - RNA, 100 nt, Artificial Sequence; identical to SEQ ID NO: 1012
  Synthetic
  misc_feature (1)..(20): n is a, c, g, or u

SEQ ID NO: 1046 - RNA, 100 nt, Artificial Sequence; identical to SEQ ID NO: 1012
  Synthetic
  misc_feature (1)..(20): n is a, c, g, or u

SEQ ID NO: 1047 - RNA, 100 nt, Artificial Sequence; identical to SEQ ID NO: 1012
  Synthetic
  misc_feature (1)..(20): n is a, c, g, or u

SEQ ID NO: 1048 - RNA, 100 nt, Artificial Sequence; identical to SEQ ID NO: 1012
  Synthetic
  misc_feature (1)..(20): n is a, c, g, or u

SEQ ID NO: 1049 - RNA, 100 nt, Artificial Sequence; identical to SEQ ID NO: 1012
  Synthetic
  misc_feature (1)..(20): n is a, c, g, or u

SEQ ID NO: 1050 - RNA, 100 nt, Artificial Sequence; identical to SEQ ID NO: 1012
  Synthetic
  misc_feature (1)..(20): n is a, c, g, or u

SEQ ID NO: 1051 - RNA, 100 nt, Artificial Sequence; identical to SEQ ID NO: 1012
  Synthetic
  misc_feature (1)..(20): n is a, c, g, or u

SEQ ID NO: 1052 - RNA, 100 nt, Artificial Sequence; identical to SEQ ID NO: 1012
  Synthetic
  misc_feature (1)..(20): n is a, c, g, or u

SEQ ID NO: 1053 - RNA, 100 nt, Artificial Sequence; identical to SEQ ID NO: 1012
  Synthetic
  misc_feature (1)..(20): n is a, c, g, or u

SEQ ID NO: 1054 - RNA, 100 nt, Artificial Sequence; identical to SEQ ID NO: 1012
  Synthetic
  misc_feature (1)..(20): n is a, c, g, or u

SEQ ID NO: 1055 - RNA, 100 nt, Artificial Sequence; identical to SEQ ID NO: 1012
  Synthetic
  misc_feature (1)..(20): n is a, c, g, or u

SEQ ID NO: 1056 - RNA, 100 nt, Artificial Sequence; identical to SEQ ID NO: 1012
  Synthetic
  misc_feature (1)..(20): n is a, c, g, or u

SEQ ID NO: 1057 - RNA, 100 nt, Artificial Sequence; identical to SEQ ID NO: 1012
  Synthetic
  misc_feature (1)..(20): n is a, c, g, or u

SEQ ID NO: 1058 - RNA, 100 nt, Artificial Sequence; identical to SEQ ID NO: 1012
  Synthetic
  misc_feature (1)..(20): n is a, c, g, or u

SEQ ID NO: 1059 - RNA, 100 nt, Artificial Sequence; identical to SEQ ID NO: 1012
  Synthetic
  misc_feature (1)..(20): n is a, c, g, or u

SEQ ID NO: 1060 - RNA, 100 nt, Artificial Sequence; identical to SEQ ID NO: 1012
  Synthetic
  misc_feature (1)..(20): n is a, c, g, or u

SEQ ID NO: 1061 - RNA, 100 nt, Artificial Sequence; identical to SEQ ID NO: 1012
  Synthetic
  misc_feature (1)..(20): n is a, c, g, or u

SEQ ID NO: 1062 - RNA, 100 nt, Artificial Sequence; identical to SEQ ID NO: 1012
  Synthetic
  misc_feature (1)..(20): n is a, c, g, or u

SEQ ID NO: 1063 - RNA, 100 nt, Artificial Sequence; identical to SEQ ID NO: 1012
  Synthetic
  misc_feature (1)..(20): n is a, c, g, or u

SEQ ID NO: 1064 - DNA, 100 bp, Artificial Sequence
  Synthetic
  misc_feature (1)..(20): n is a, c, g, t or u
nnnnnnnnnnnnnnnnnnnnguuuuagagcuagaaauagcaagutaaaataaggcuaguccguuaucaacuugaaaaaguggcaccgagucggugcuuuu

SEQ ID NO: 1065 - RNA, 100 nt, Artificial Sequence; identical to SEQ ID NO: 1012
  Synthetic
  misc_feature (1)..(20): n is a, c, g, or u

SEQ ID NO: 1066 - RNA, 100 nt, Artificial Sequence; identical to SEQ ID NO: 1012
  Synthetic
  misc_feature (1)..(20): n is a, c, g, or u

SEQ ID NO: 1067 - RNA, 100 nt, Artificial Sequence; identical to SEQ ID NO: 1012
  Synthetic
  misc_feature (1)..(20): n is a, c, g, or u

SEQ ID NO: 1068 - RNA, 100 nt, Artificial Sequence; identical to SEQ ID NO: 1012
  Synthetic
  misc_feature (1)..(20): n is a, c, g, or u

SEQ ID NO: 1069 - RNA, 100 nt, Artificial Sequence; identical to SEQ ID NO: 1012
  Synthetic
  misc_feature (1)..(20): n is a, c, g, or u

SEQ ID NO: 1070 - RNA, 100 nt, Artificial Sequence; identical to SEQ ID NO: 1012
  Synthetic
  misc_feature (1)..(20): n is a, c, g, or u

SEQ ID NO: 1071 - RNA, 100 nt, Artificial Sequence; identical to SEQ ID NO: 1012
  Synthetic
  misc_feature (1)..(20): n is a, c, g, or u

SEQ ID NO: 1072 - RNA, 100 nt, Artificial Sequence; identical to SEQ ID NO: 1012
  Synthetic
  misc_feature (1)..(20): n is a, c, g, or u

SEQ ID NO: 1073 - RNA, 100 nt, Artificial Sequence; identical to SEQ ID NO: 1012
  Synthetic
  misc_feature (1)..(20): n is a, c, g, or u

SEQ ID NO: 1074 - RNA, 100 nt, Artificial Sequence; identical to SEQ ID NO: 1012
  Synthetic
  misc_feature (1)..(20): n is a, c, g, or u

SEQ ID NO: 1075 - RNA, 100 nt, Artificial Sequence; identical to SEQ ID NO: 1012
  Synthetic
  misc_feature (1)..(20): n is a, c, g, or u

SEQ ID NO: 1076 - RNA, 100 nt, Artificial Sequence; identical to SEQ ID NO: 1012
  Synthetic
  misc_feature (1)..(20): n is a, c, g, or u

SEQ ID NO: 1077 - RNA, 100 nt, Artificial Sequence; identical to SEQ ID NO: 1012
  Synthetic
  misc_feature (1)..(20): n is a, c, g, or u

SEQ ID NO: 1078 - RNA, 100 nt, Artificial Sequence; identical to SEQ ID NO: 1012
  Synthetic
  misc_feature (1)..(20): n is a, c, g, or u

SEQ ID NO: 1079 - RNA, 100 nt, Artificial Sequence; identical to SEQ ID NO: 1012
  Synthetic
  misc_feature (1)..(20): n is a, c, g, or u

SEQ ID NO: 1080 - RNA, 100 nt, Artificial Sequence; identical to SEQ ID NO: 1012
  Synthetic
  misc_feature (1)..(20): n is a, c, g, or u

SEQ ID NO: 1081 - RNA, 100 nt, Artificial Sequence; identical to SEQ ID NO: 1012
  Synthetic
  misc_feature (1)..(20): n is a, c, g, or u

SEQ ID NO: 1082 - RNA, 100 nt, Artificial Sequence; identical to SEQ ID NO: 1012
  Synthetic
  misc_feature (1)..(20): n is a, c, g, or u

SEQ ID NO: 1083 - RNA, 100 nt, Artificial Sequence; identical to SEQ ID NO: 1012
  Synthetic
  misc_feature (1)..(20): n is a, c, g, or u

SEQ ID NO: 1084 - RNA, 100 nt, Artificial Sequence; identical to SEQ ID NO: 1012
  Synthetic
  misc_feature (1)..(20): n is a, c, g, or u

SEQ ID NO: 1085 - RNA, 100 nt, Artificial Sequence; identical to SEQ ID NO: 1012
  Synthetic
  misc_feature (1)..(20): n is a, c, g, or u

SEQ ID NO: 1086 - RNA, 100 nt, Artificial Sequence; identical to SEQ ID NO: 1012
  Synthetic
  misc_feature (1)..(20): n is a, c, g, or u

SEQ ID NO: 1087 - RNA, 100 nt, Artificial Sequence; identical to SEQ ID NO: 1012
  Synthetic
  misc_feature (1)..(20): n is a, c, g, or u

SEQ ID NO: 1088 - RNA, 100 nt, Artificial Sequence; identical to SEQ ID NO: 1012
  Synthetic
  misc_feature (1)..(20): n is a, c, g, or u

SEQ ID NO: 1089 - RNA, 100 nt, Artificial Sequence; identical to SEQ ID NO: 1012
  Synthetic
  misc_feature (1)..(20): n is a, c, g, or u

SEQ ID NO: 1090 - RNA, 100 nt, Artificial Sequence; identical to SEQ ID NO: 1012
  Synthetic
  misc_feature (1)..(20): n is a, c, g, or u

SEQ ID NO: 1091 - RNA, 100 nt, Artificial Sequence; identical to SEQ ID NO: 1012
  Synthetic
  misc_feature (1)..(20): n is a, c, g, or u

SEQ ID NO: 1092 - RNA, 100 nt, Artificial Sequence; identical to SEQ ID NO: 1012
  Synthetic
  misc_feature (1)..(20): n is a, c, g, or u

SEQ ID NO: 1093 - DNA, 100 bp, Artificial Sequence; identical to SEQ ID NO: 1064
  Synthetic
  misc_feature (1)..(20): n is a, c, g, t or u

SEQ ID NO: 1094 - RNA, 100 nt, Artificial Sequence; identical to SEQ ID NO: 1012
  Synthetic
  misc_feature (1)..(20): n is a, c, g, or u

SEQ ID NO: 1095 - RNA, 100 nt, Artificial Sequence; identical to SEQ ID NO: 1012
  Synthetic
  misc_feature (1)..(20): n is a, c, g, or u

SEQ ID NO: 1096 - RNA, 100 nt, Artificial Sequence; identical to SEQ ID NO: 1012
  Synthetic
  misc_feature (1)..(20): n is a, c, g, or u

SEQ ID NO: 1097 - RNA, 100 nt, Artificial Sequence; identical to SEQ ID NO: 1012
  Synthetic
  misc_feature (1)..(20): n is a, c, g, or u

SEQ ID NO: 1098 - RNA, 100 nt, Artificial Sequence; identical to SEQ ID NO: 1012
  Synthetic
  misc_feature (1)..(20): n is a, c, g, or u

SEQ ID NO: 1099 - RNA, 100 nt, Artificial Sequence; identical to SEQ ID NO: 1012
  Synthetic
  misc_feature (1)..(20): n is a, c, g, or u

SEQ ID NO: 1100 - RNA, 100 nt, Artificial Sequence; identical to SEQ ID NO: 1012
  Synthetic
  misc_feature (1)..(20): n is a, c, g, or u

SEQ ID NO: 1101 - RNA, 100 nt, Artificial Sequence; identical to SEQ ID NO: 1012
  Synthetic
  misc_feature (1)..(20): n is a, c, g, or u

SEQ ID NO: 1102 - RNA, 100 nt, Artificial Sequence; identical to SEQ ID NO: 1012
  Synthetic
  misc_feature (1)..(20): n is a, c, g, or u

SEQ ID NO: 1103 - RNA, 100 nt, Artificial Sequence; identical to SEQ ID NO: 1012
  Synthetic
  misc_feature (1)..(20): n is a, c, g, or u

SEQ ID NO: 1104 - RNA, 100 nt, Artificial Sequence; identical to SEQ ID NO: 1012
  Synthetic
  misc_feature (1)..(20): n is a, c, g, or u

SEQ ID NO: 1105 - RNA, 100 nt, Artificial Sequence; identical to SEQ ID NO: 1012
  Synthetic
  misc_feature (1)..(20): n is a, c, g, or u

SEQ ID NO: 1106 - RNA, 100 nt, Artificial Sequence; identical to SEQ ID NO: 1012
  Synthetic
  misc_feature (1)..(20): n is a, c, g, or u

SEQ ID NO: 1107 - RNA, 100 nt, Artificial Sequence; identical to SEQ ID NO: 1012
  Synthetic
  misc_feature (1)..(20): n is a, c, g, or u

SEQ ID NO: 1108 - RNA, 100 nt, Artificial Sequence; identical to SEQ ID NO: 1012
  Synthetic
  misc_feature (1)..(20): n is a, c, g, or u

SEQ ID NO: 1109 - RNA, 100 nt, Artificial Sequence; identical to SEQ ID NO: 1012
  Synthetic
  misc_feature (1)..(20): n is a, c, g, or u

SEQ ID NO: 1110 - RNA, 100 nt, Artificial Sequence; identical to SEQ ID NO: 1012
  Synthetic
  misc_feature (1)..(20): n is a, c, g, or u

SEQ ID NO: 1111 - RNA, 100 nt, Artificial Sequence; identical to SEQ ID NO: 1012
  Synthetic
  misc_feature (1)..(20): n is a, c, g, or u

SEQ ID NO: 1112 - RNA, 100 nt, Artificial Sequence; identical to SEQ ID NO: 1012
  Synthetic
  misc_feature (1)..(20): n is a, c, g, or u

SEQ ID NO: 1113 - RNA, 100 nt, Artificial Sequence; identical to SEQ ID NO: 1012
  Synthetic
  misc_feature (1)..(20): n is a, c, g, or u

SEQ ID NO: 1114 - RNA, 100 nt, Artificial Sequence; identical to SEQ ID NO: 1012
  Synthetic
  misc_feature (1)..(20): n is a, c, g, or u

SEQ ID NO: 1115 - RNA, 100 nt, Artificial Sequence; identical to SEQ ID NO: 1012
  Synthetic
  misc_feature (1)..(20): n is a, c, g, or u

SEQ ID NO: 1116 - RNA, 100 nt, Artificial Sequence; identical to SEQ ID NO: 1012
  Synthetic
  misc_feature (1)..(20): n is a, c, g, or u

SEQ ID NO: 1117 - RNA, 100 nt, Artificial Sequence
  Synthetic
  misc_feature (1)..(20): n is a, c, g, or u
nnnnnnnnnnnnnnnnnnnnguuuuagagcuagaaauagcaaguuaaaauaaggcuaguccgugaucaacuugaaaaaguggcaccgagucggugcuuuu

SEQ ID NO: 1118 - RNA, 100 nt, Artificial Sequence; identical to SEQ ID NO: 1012
  Synthetic
  misc_feature (1)..(20): n is a, c, g, or u

SEQ ID NO: 1119 - RNA, 100 nt, Artificial Sequence; identical to SEQ ID NO: 1012
  Synthetic
  misc_feature (1)..(20): n is a, c, g, or u

SEQ ID NO: 1120 - RNA, 100 nt, Artificial Sequence; identical to SEQ ID NO: 1012
  Synthetic
  misc_feature (1)..(20): n is a, c, g, or u

SEQ ID NO: 1121 - RNA, 100 nt, Artificial Sequence; identical to SEQ ID NO: 1012
  Synthetic
  misc_feature (1)..(20): n is a, c, g, or u

SEQ ID NO: 1122 - RNA, 100 nt, Artificial Sequence; identical to SEQ ID NO: 1012
  Synthetic
  misc_feature (1)..(20): n is a, c, g, or u

SEQ ID NO: 1123 - RNA, 100 nt, Artificial Sequence; identical to SEQ ID NO: 1012
  Synthetic
  misc_feature (1)..(20): n is a, c, g, or u

SEQ ID NO: 1124 - RNA, 100 nt, Artificial Sequence; identical to SEQ ID NO: 1012
  Synthetic
  misc_feature (1)..(20): n is a, c, g, or u

SEQ ID NO: 1125 - RNA, 100 nt, Artificial Sequence; identical to SEQ ID NO: 1012
  Synthetic
  misc_feature (1)..(20): n is a, c, g, or u

SEQ ID NO: 1126 - RNA, 100 nt, Artificial Sequence; identical to SEQ ID NO: 1012
  Synthetic
  misc_feature (1)..(20): n is a, c, g, or u

SEQ ID NO: 1127 - RNA, 100 nt, Artificial Sequence; identical to SEQ ID NO: 1012
  Synthetic
  misc_feature (1)..(20): n is a, c, g, or u

SEQ ID NO: 1128 - RNA, 100 nt, Artificial Sequence; identical to SEQ ID NO: 1012
  Synthetic
  misc_feature (1)..(20): n is a, c, g, or u

SEQ ID NO: 1129 - RNA, 100 nt, Artificial Sequence; identical to SEQ ID NO: 1012
  Synthetic
  misc_feature (1)..(20): n is a, c, g, or u

SEQ ID NO: 1130 - RNA, 100 nt, Artificial Sequence; identical to SEQ ID NO: 1012
  Synthetic
  misc_feature (1)..(20): n is a, c, g, or u

SEQ ID NO: 1131 - RNA, 100 nt, Artificial Sequence; identical to SEQ ID NO: 1012
  Synthetic
  misc_feature (1)..(20): n is a, c, g, or u

SEQ ID NO: 1132 - RNA, 100 nt, Artificial Sequence; identical to SEQ ID NO: 1012
  Synthetic
  misc_feature (1)..(20): n is a, c, g, or u

SEQ ID NO: 1133-1199 - skipped (67 entries)

SEQ ID NO: 1200 - RNA, 76 nt, Artificial Sequence; identical to SEQ ID NO: 233
  Synthetic

SEQ ID NO: 1201 - RNA, 100 nt, Artificial Sequence
  Synthetic
aaccugugaaaaugcuccccguuuuagagcuagaaauagcaaguuaaaauaaggcuaguccguuaucaacuugaaaaaguggcaccgagucggugcuuuu

SEQ ID NO: 1202 - RNA, 100 nt, Artificial Sequence
  Synthetic
uguucugccagaaauuguggguuuuagagcuagaaauagcaaguuaaaauaaggcuaguccguuaucaacuugaaaaaguggcaccgagucggugcuuuu

SEQ ID NO: 1203 - RNA, 100 nt, Artificial Sequence
  Synthetic
gcccguucccagggacugacguuuuagagcuagaaauagcaaguuaaaauaaggcuaguccguuaucaacuugaaaaaguggcaccgagucggugcuuuu

SEQ ID NO: 1204 - RNA, 100 nt, Artificial Sequence
  Synthetic
aauagacccaucuaucagcuguuuuagagcuagaaauagcaaguuaaaauaaggcuaguccguuaucaacuugaaaaaguggcaccgagucggugcuuuu

SEQ ID NO: 1205 - RNA, 100 nt, Artificial Sequence; identical to SEQ ID NO: 1201
  Synthetic

SEQ ID NO: 1206 - RNA, 100 nt, Artificial Sequence; identical to SEQ ID NO: 1202
  Synthetic

SEQ ID NO: 1207 - RNA, 100 nt, Artificial Sequence; identical to SEQ ID NO: 1203
  Synthetic

SEQ ID NO: 1208 - RNA, 100 nt, Artificial Sequence; identical to SEQ ID NO: 1204
  Synthetic

SEQ ID NO: 1209 - RNA, 88 nt, Artificial Sequence
  Synthetic
aaccugugaaaaugcuccccguuuuagagcuagaaauagcaaguuaaaauaaggcuaguccguuaucaacuuggcaccgagucggugc

SEQ ID NO: 1210 - RNA, 88 nt, Artificial Sequence
  Synthetic
uguucugccagaaauuguggguuuuagagcuagaaauagcaaguuaaaauaaggcuaguccguuaucaacuuggcaccgagucggugc

SEQ ID NO: 1211 - RNA, 88 nt, Artificial Sequence
  Synthetic
gcccguucccagggacugacguuuuagagcuagaaauagcaaguuaaaauaaggcuaguccguuaucaacuuggcaccgagucggugc

SEQ ID NO: 1212 - RNA, 88 nt, Artificial Sequence
  Synthetic
aauagacccaucuaucagcuguuuuagagcuagaaauagcaaguuaaaauaaggcuaguccguuaucaacuuggcaccgagucggugc

SEQ ID NO: 1213 - RNA, 74 nt, Artificial Sequence
  Synthetic
aacagcauagcaaguuaaaauaaggcuaguccguuaucaacuugaaaaaguggcaccgagucggugcuuuuuuu

SEQ ID NO: 1214 - RNA, 42 nt, Artificial Sequence
  Synthetic
cacgcccccacccuaaucagguuuuagagcuaugcuguuuug

SEQ ID NO: 1215 - RNA, 40 nt, Artificial Sequence
  Synthetic
cgcccccacccuaaucagguuuuagagcuaugcuguuuug

SEQ ID NO: 1216 - RNA, 38 nt, Artificial Sequence
  Synthetic
cccccacccuaaucagguuuuagagcuaugcuguuuug

SEQ ID NO: 1217 - RNA, 39 nt, Artificial Sequence
  Synthetic
gcccccacccuaaucagguuuuagagcuaugcuguuuug

SEQ ID NO: 1218 - RNA, 41 nt, Artificial Sequence
  Synthetic
acgcccccacccuaaucagguuuuagagcuaugcuguuuug

SEQ ID NO: 1219 - RNA, 42 nt, Artificial Sequence; identical to SEQ ID NO: 1214
  Synthetic

SEQ ID NO: 1220 - RNA, 42 nt, Artificial Sequence; identical to SEQ ID NO: 1214
  Synthetic

SEQ ID NO: 1221 - RNA, 42 nt, Artificial Sequence; identical to SEQ ID NO: 1214
  Synthetic

SEQ ID NO: 1222 - RNA, 42 nt, Artificial Sequence; identical to SEQ ID NO: 1214
  Synthetic

SEQ ID NO: 1223 - RNA, 42 nt, Artificial Sequence; identical to SEQ ID NO: 1214
  Synthetic

SEQ ID NO: 1224 - RNA, 42 nt, Artificial Sequence; identical to SEQ ID NO: 1214
  Synthetic

SEQ ID NO: 1225 - RNA, 42 nt, Artificial Sequence; identical to SEQ ID NO: 1214
  Synthetic

SEQ ID NO: 1226 - RNA, 42 nt, Artificial Sequence; identical to SEQ ID NO: 1214
  Synthetic

SEQ ID NO: 1227 - RNA, 42 nt, Artificial Sequence; identical to SEQ ID NO: 1214
  Synthetic

SEQ ID NO: 1228 - RNA, 42 nt, Artificial Sequence; identical to SEQ ID NO: 1214
  Synthetic

SEQ ID NO: 1229 - RNA, 44 nt, Artificial Sequence
  Synthetic
ggcacgcccccacccuaaucagguuuuagagcuaugcuguuuug

SEQ ID NO: 1230 - RNA, 42 nt, Artificial Sequence; identical to SEQ ID NO: 1214
  Synthetic

SEQ ID NO: 1231 - RNA, 42 nt, Artificial Sequence; identical to SEQ ID NO: 1214
  Synthetic

SEQ ID NO: 1232 - RNA, 42 nt, Artificial Sequence; identical to SEQ ID NO: 1214
  Synthetic

SEQ ID NO: 1233 - RNA, 42 nt, Artificial Sequence; identical to SEQ ID NO: 1214
  Synthetic

SEQ ID NO: 1234 - RNA, 42 nt, Artificial Sequence; identical to SEQ ID NO: 1214
  Synthetic

SEQ ID NO: 1235 - RNA, 42 nt, Artificial Sequence; identical to SEQ ID NO: 1214
  Synthetic

SEQ ID NO: 1236 - RNA, 42 nt, Artificial Sequence; identical to SEQ ID NO: 1214
  Synthetic

SEQ ID NO: 1237 - RNA, 42 nt, Artificial Sequence; identical to SEQ ID NO: 1214
  Synthetic

SEQ ID NO: 1238 - RNA, 42 nt, Artificial Sequence; identical to SEQ ID NO: 1214
  Synthetic

SEQ ID NO: 1239 - RNA, 42 nt, Artificial Sequence; identical to SEQ ID NO: 1214
  Synthetic

SEQ ID NO: 1240 - RNA, 42 nt, Artificial Sequence; identical to SEQ ID NO: 1214
  Synthetic

SEQ ID NO: 1241 - RNA, 42 nt, Artificial Sequence; identical to SEQ ID NO: 1214
  Synthetic

SEQ ID NO: 1242 - RNA, 42 nt, Artificial Sequence; identical to SEQ ID NO: 1214
  Synthetic

SEQ ID NO: 1243 - RNA, 42 nt, Artificial Sequence; identical to SEQ ID NO: 1214
  Synthetic

SEQ ID NO: 1244 - RNA, 42 nt, Artificial Sequence; identical to SEQ ID NO: 1214
  Synthetic

SEQ ID NO: 1245 - RNA, 42 nt, Artificial Sequence; identical to SEQ ID NO: 1214
  Synthetic

SEQ ID NO: 1246 - RNA, 42 nt, Artificial Sequence; identical to SEQ ID NO: 1214
  Synthetic

SEQ ID NO: 1247 - RNA, 42 nt, Artificial Sequence; identical to SEQ ID NO: 1214
  Synthetic

SEQ ID NO: 1248 - RNA, 42 nt, Artificial Sequence; identical to SEQ ID NO: 1214
  Synthetic

SEQ ID NO: 1249 - RNA, 42 nt, Artificial Sequence; identical to SEQ ID NO: 1214
  Synthetic

SEQ ID NO: 1250 - RNA, 42 nt, Artificial Sequence; identical to SEQ ID NO: 1214
  Synthetic

SEQ ID NO: 1251 - RNA, 42 nt, Artificial Sequence; identical to SEQ ID NO: 1214
  Synthetic

SEQ ID NO: 1252 - RNA, 42 nt, Artificial Sequence; identical to SEQ ID NO: 1214
  Synthetic

SEQ ID NO: 1253 - RNA, 42 nt, Artificial Sequence; identical to SEQ ID NO: 1214
  Synthetic

SEQ ID NO: 1254 - RNA, 42 nt, Artificial Sequence; identical to SEQ ID NO: 1214
  Synthetic

SEQ ID NO: 1255 - RNA, 42 nt, Artificial Sequence; identical to SEQ ID NO: 1214
  Synthetic

SEQ ID NO: 1256 - RNA, 42 nt, Artificial Sequence; identical to SEQ ID NO: 1214
  Synthetic

SEQ ID NO: 1257 - RNA, 42 nt, Artificial Sequence; identical to SEQ ID NO: 1214
  Synthetic

SEQ ID NO: 1258 - RNA, 42 nt, Artificial Sequence; identical to SEQ ID NO: 1214
  Synthetic

SEQ ID NO: 1259 - RNA, 42 nt, Artificial Sequence; identical to SEQ ID NO: 1214
  Synthetic

SEQ ID NO: 1260 - RNA, 42 nt, Artificial Sequence; identical to SEQ ID NO: 1214
  Synthetic

SEQ ID NO: 1261 - RNA, 42 nt, Artificial Sequence; identical to SEQ ID NO: 1214
  Synthetic

SEQ ID NO: 1262 - RNA, 42 nt, Artificial Sequence; identical to SEQ ID NO: 1214
  Synthetic

SEQ ID NO: 1263 - RNA, 42 nt, Artificial Sequence; identical to SEQ ID NO: 1214
  Synthetic

SEQ ID NO: 1264 - RNA, 42 nt, Artificial Sequence; identical to SEQ ID NO: 1214
  Synthetic

SEQ ID NO: 1265 - RNA, 44 nt, Artificial Sequence; identical to SEQ ID NO: 1229
  Synthetic

SEQ ID NO: 1266 - RNA, 44 nt, Artificial Sequence
  Synthetic
cccacgcccccacccuaaucagguuuuagagcuaugcuguuuug

SEQ ID NO: 1267 - RNA, 42 nt, Artificial Sequence; identical to SEQ ID NO: 1214
  Synthetic

SEQ ID NO: 1268 - RNA, 42 nt, Artificial Sequence; identical to SEQ ID NO: 1214
  Synthetic

SEQ ID NO: 1269 - RNA, 42 nt, Artificial Sequence
  Synthetic
  misc_feature (1)..(1): n is inosine
nacgcccccacccuaaucagguuuuagagcuaugcuguuuug

SEQ ID NO: 1270 - RNA, 42 nt, Artificial Sequence
  Synthetic
  misc_feature (2)..(2): n is inosine
cncgcccccacccuaaucagguuuuagagcuaugcuguuuug

SEQ ID NO: 1271 - RNA, 42 nt, Artificial Sequence
  Synthetic
  misc_feature (3)..(3): n is inosine
cangcccccacccuaaucagguuuuagagcuaugcuguuuug

SEQ ID NO: 1272 - RNA, 42 nt, Artificial Sequence
  Synthetic
  misc_feature (4)..(4): n is inosine
cacncccccacccuaaucagguuuuagagcuaugcuguuuug

SEQ ID NO: 1273 - RNA, 42 nt, Artificial Sequence
  Synthetic
  misc_feature (5)..(5): n is inosine
cacgnccccacccuaaucagguuuuagagcuaugcuguuuug

SEQ ID NO: 1274 - RNA, 42 nt, Artificial Sequence
  Synthetic
  misc_feature (6)..(6): n is inosine
cacgcncccacccuaaucagguuuuagagcuaugcuguuuug

SEQ ID NO: 1275 - RNA, 42 nt, Artificial Sequence
  Synthetic
  misc_feature (7)..(7): n is inosine
cacgccnccacccuaaucagguuuuagagcuaugcuguuuug

SEQ ID NO: 1276 - RNA, 42 nt, Artificial Sequence
  Synthetic
  misc_feature (8)..(8): n is inosine
cacgcccncacccuaaucagguuuuagagcuaugcuguuuug

SEQ ID NO: 1277 - RNA, 42 nt, Artificial Sequence
  Synthetic
  misc_feature (9)..(9): n is inosine
cacgccccnacccuaaucagguuuuagagcuaugcuguuuug

SEQ ID NO: 1278 - RNA, 42 nt, Artificial Sequence
  Synthetic
  misc_feature (10)..(10): n is inosine
cacgcccccncccuaaucagguuuuagagcuaugcuguuuug

SEQ ID NO: 1279 - RNA, 42 nt, Artificial Sequence
  Synthetic
  misc_feature (11)..(11): n is inosine
cacgcccccanccuaaucagguuuuagagcuaugcuguuuug

SEQ ID NO: 1280 - RNA, 42 nt, Artificial Sequence
  Synthetic
  misc_feature (12)..(12): n is inosine
cacgcccccacncuaaucagguuuuagagcuaugcuguuuug

SEQ ID NO: 1281 - RNA, 42 nt, Artificial Sequence
  Synthetic
  misc_feature (13)..(13): n is inosine
cacgcccccaccnuaaucagguuuuagagcuaugcuguuuug

SEQ ID NO: 1282 - RNA, 42 nt, Artificial Sequence
  Synthetic
  misc_feature (14)..(14): n is inosine
cacgcccccacccnaaucagguuuuagagcuaugcuguuuug

SEQ ID NO: 1283 - RNA, 42 nt, Artificial Sequence
  Synthetic
  misc_feature (15)..(15): n is inosine
cacgcccccacccunaucagguuuuagagcuaugcuguuuug

SEQ ID NO: 1284 - RNA, 42 nt, Artificial Sequence
  Synthetic
  misc_feature (16)..(16): n is inosine
cacgcccccacccuanucagguuuuagagcuaugcuguuuug

SEQ ID NO: 1285 - RNA, 42 nt, Artificial Sequence
  Synthetic
  misc_feature (17)..(17): n is inosine
cacgcccccacccuaancagguuuuagagcuaugcuguuuug

SEQ ID NO: 1286 - RNA, 42 nt, Artificial Sequence
  Synthetic
  misc_feature (18)..(18): n is inosine
cacgcccccacccuaaunagguuuuagagcuaugcuguuuug

SEQ ID NO: 1287 - RNA, 42 nt, Artificial Sequence
  Synthetic
  misc_feature (19)..(19): n is inosine
cacgcccccacccuaaucngguuuuagagcuaugcuguuuug

SEQ ID NO: 1288 - RNA, 42 nt, Artificial Sequence
  Synthetic
  misc_feature (20)..(20): n is inosine
cacgcccccacccuaaucanguuuuagagcuaugcuguuuug

SEQ ID NO: 1289 - RNA, 42 nt, Artificial Sequence; identical to SEQ ID NO: 1214
  Synthetic

SEQ ID NO: 1290 - RNA, 42 nt, Artificial Sequence; identical to SEQ ID NO: 1214
  Synthetic

SEQ ID NO: 1291 - RNA, 42 nt, Artificial Sequence; identical to SEQ ID NO: 1214
  Synthetic

SEQ ID NO: 1292 - RNA, 42 nt, Artificial Sequence; identical to SEQ ID NO: 1214
  Synthetic

SEQ ID NO: 1293 - RNA, 42 nt, Artificial Sequence; identical to SEQ ID NO: 1214
  Synthetic

SEQ ID NO: 1294 - RNA, 42 nt, Artificial Sequence; identical to SEQ ID NO: 1214
  Synthetic

SEQ ID NO: 1295 - RNA, 42 nt, Artificial Sequence; identical to SEQ ID NO: 1214
  Synthetic

SEQ ID NO: 1296 - RNA, 42 nt, Artificial Sequence; identical to SEQ ID NO: 1214
  Synthetic

SEQ ID NO: 1297 - RNA, 42 nt, Artificial Sequence; identical to SEQ ID NO: 1214
  Synthetic

SEQ ID NO: 1298 - RNA, 42 nt, Artificial Sequence; identical to SEQ ID NO: 1214
  Synthetic

SEQ ID NO: 1299 - RNA, 42 nt, Artificial Sequence; identical to SEQ ID NO: 1214
  Synthetic

SEQ ID NO: 1300 - RNA, 42 nt, Artificial Sequence; identical to SEQ ID NO: 1214
  Synthetic

SEQ ID NO: 1301 - RNA, 42 nt, Artificial Sequence; identical to SEQ ID NO: 1214
  Synthetic

SEQ ID NO: 1302 - DNA, 42 bp, Artificial Sequence
  Synthetic
cacgcccccaccctaaucagguuuuagagcuaugcuguuuug

SEQ ID NO: 1303 - RNA, 42 nt, Artificial Sequence; identical to SEQ ID NO: 1214
  Synthetic

SEQ ID NO: 1304 - RNA, 42 nt, Artificial Sequence; identical to SEQ ID NO: 1214
  Synthetic

SEQ ID NO: 1305 - DNA, 42 bp, Artificial Sequence
  Synthetic
cacgcccccacccuaatcagguuuuagagcuaugcuguuuug

SEQ ID NO: 1306 - RNA, 42 nt, Artificial Sequence; identical to SEQ ID NO: 1214
  Synthetic

SEQ ID NO: 1307 - RNA, 42 nt, Artificial Sequence; identical to SEQ ID NO: 1214
  Synthetic

SEQ ID NO: 1308 - RNA, 42 nt, Artificial Sequence; identical to SEQ ID NO: 1214
  Synthetic

SEQ ID NO: 1309 - RNA, 42 nt, Artificial Sequence; identical to SEQ ID NO: 1214
  Synthetic

SEQ ID NO: 1310 - RNA, 42 nt, Artificial Sequence; identical to SEQ ID NO: 1214
  Synthetic

SEQ ID NO: 1311 - RNA, 42 nt, Artificial Sequence; identical to SEQ ID NO: 1214
  Synthetic

SEQ ID NO: 1312 - RNA, 42 nt, Artificial Sequence; identical to SEQ ID NO: 1214
  Synthetic

SEQ ID NO: 1313 - RNA, 42 nt, Artificial Sequence; identical to SEQ ID NO: 1214
  Synthetic

SEQ ID NO: 1314 - RNA, 42 nt, Artificial Sequence; identical to SEQ ID NO: 1214
  Synthetic

SEQ ID NO: 1315 - DNA, 42 bp, Artificial Sequence; identical to SEQ ID NO: 1302
  Synthetic

SEQ ID NO: 1316 - RNA, 42 nt, Artificial Sequence; identical to SEQ ID NO: 1214
  Synthetic

SEQ ID NO: 1317 - DNA, 42 bp, Artificial Sequence; identical to SEQ ID NO: 1305
  Synthetic

SEQ ID NO: 1318 - RNA, 42 nt, Artificial Sequence; identical to SEQ ID NO: 1214
  Synthetic

SEQ ID NO: 1319 - RNA, 100 nt, Artificial Sequence; identical to SEQ ID NO: 43
  Synthetic

SEQ ID NO: 1320 - RNA, 100 nt, Artificial Sequence; identical to SEQ ID NO: 43
  Synthetic

SEQ ID NO: 1321 - RNA, 42 nt, Artificial Sequence
  Synthetic
aaaguucuagaugcuguccgguuuuagagcuaugcuguuuug

SEQ ID NO: 1322 - RNA, 42 nt, Artificial Sequence
  Synthetic
ugaauccaaguguccucugaguuuuagagcuaugcuguuuug

SEQ ID NO: 1323 - RNA, 42 nt, Artificial Sequence; identical to SEQ ID NO: 1322
  Synthetic

SEQ ID NO: 1324 - RNA, 42 nt, Artificial Sequence; identical to SEQ ID NO: 1322
  Synthetic

SEQ ID NO: 1325 - RNA, 42 nt, Artificial Sequence; identical to SEQ ID NO: 1322
  Synthetic

SEQ ID NO: 1326 - RNA, 42 nt, Artificial Sequence; identical to SEQ ID NO: 1322
  Synthetic

SEQ ID NO: 1327 - RNA, 42 nt, Artificial Sequence; identical to SEQ ID NO: 1322
  Synthetic

SEQ ID NO: 1328 - RNA, 42 nt, Artificial Sequence; identical to SEQ ID NO: 1322
  Synthetic

SEQ ID NO: 1329 - RNA, 42 nt, Artificial Sequence; identical to SEQ ID NO: 1322
  Synthetic

SEQ ID NO: 1330 - RNA, 42 nt, Artificial Sequence; identical to SEQ ID NO: 1322
  Synthetic

SEQ ID NO: 1331 - RNA, 42 nt, Artificial Sequence; identical to SEQ ID NO: 1322
  Synthetic

SEQ ID NO: 1332 - RNA, 42 nt, Artificial Sequence; identical to SEQ ID NO: 1322
  Synthetic

SEQ ID NO: 1333 - RNA, 42 nt, Artificial Sequence; identical to SEQ ID NO: 1322
  Synthetic

SEQ ID NO: 1334 - RNA, 42 nt, Artificial Sequence; identical to SEQ ID NO: 1322
  Synthetic

SEQ ID NO: 1335 - RNA, 42 nt, Artificial Sequence; identical to SEQ ID NO: 1322
  Synthetic

SEQ ID NO: 1336 - RNA, 42 nt, Artificial Sequence; identical to SEQ ID NO: 1322
  Synthetic

SEQ ID NO: 1337 - RNA, 42 nt, Artificial Sequence; identical to SEQ ID NO: 1322
  Synthetic

SEQ ID NO: 1338 - RNA, 42 nt, Artificial Sequence; identical to SEQ ID NO: 1322
  Synthetic

SEQ ID NO: 1339 - RNA, 42 nt, Artificial Sequence; identical to SEQ ID NO: 1322
  Synthetic

SEQ ID NO: 1340 - RNA, 42 nt, Artificial Sequence; identical to SEQ ID NO: 1322
  Synthetic

SEQ ID NO: 1341 - RNA, 42 nt, Artificial Sequence; identical to SEQ ID NO: 1322
  Synthetic

SEQ ID NO: 1342 - RNA, 42 nt, Artificial Sequence; identical to SEQ ID NO: 1322
  Synthetic

SEQ ID NO: 1343 - RNA, 42 nt, Artificial Sequence; identical to SEQ ID NO: 1322
  Synthetic

SEQ ID NO: 1344 - RNA, 42 nt, Artificial Sequence; identical to SEQ ID NO: 1322
  Synthetic

SEQ ID NO: 1345 - RNA, 42 nt, Artificial Sequence; identical to SEQ ID NO: 1322
  Synthetic

SEQ ID NO: 1346 - RNA, 42 nt, Artificial Sequence; identical to SEQ ID NO: 1322
  Synthetic

SEQ ID NO: 1347 - RNA, 42 nt, Artificial Sequence; identical to SEQ ID NO: 1322
  Synthetic

SEQ ID NO: 1348 - RNA, 42 nt, Artificial Sequence; identical to SEQ ID NO: 1322
  Synthetic

SEQ ID NO: 1349 - RNA, 42 nt, Artificial Sequence; identical to SEQ ID NO: 1322
  Synthetic

SEQ ID NO: 1350 - RNA, 42 nt, Artificial Sequence; identical to SEQ ID NO: 1322
  Synthetic

SEQ ID NO: 1351 - RNA, 42 nt, Artificial Sequence; identical to SEQ ID NO: 1322
  Synthetic

SEQ ID NO: 1352 - RNA, 42 nt, Artificial Sequence; identical to SEQ ID NO: 1322
  Synthetic

SEQ ID NO: 1353 - RNA, 42 nt, Artificial Sequence; identical to SEQ ID NO: 1322
  Synthetic

SEQ ID NO: 1354 - RNA, 42 nt, Artificial Sequence; identical to SEQ ID NO: 1322
  Synthetic

SEQ ID NO: 1355 - RNA, 42 nt, Artificial Sequence; identical to SEQ ID NO: 1322
  Synthetic

SEQ ID NO: 1356 - RNA, 42 nt, Artificial Sequence; identical to SEQ ID NO: 1322
  Synthetic

SEQ ID NO: 1357 - RNA, 42 nt, Artificial Sequence; identical to SEQ ID NO: 1322
  Synthetic

SEQ ID NO: 1358 - RNA, 42 nt, Artificial Sequence; identical to SEQ ID NO: 1322
  Synthetic

SEQ ID NO: 1359 - RNA, 42 nt, Artificial Sequence; identical to SEQ ID NO: 1322
  Synthetic

SEQ ID NO: 1360 - RNA, 42 nt, Artificial Sequence; identical to SEQ ID NO: 1322
  Synthetic

SEQ ID NO: 1361 - RNA, 42 nt, Artificial Sequence; identical to SEQ ID NO: 1322
  Synthetic

SEQ ID NO: 1362 - RNA, 42 nt, Artificial Sequence; identical to SEQ ID NO: 1322
  Synthetic

SEQ ID NO: 1363 - RNA, 42 nt, Artificial Sequence; identical to SEQ ID NO: 1322
  Synthetic

SEQ ID NO: 1364 - RNA, 42 nt, Artificial Sequence; identical to SEQ ID NO: 1322
  Synthetic

SEQ ID NO: 1365 - RNA, 42 nt, Artificial Sequence; identical to SEQ ID NO: 1322
  Synthetic

SEQ ID NO: 1366 - RNA, 42 nt, Artificial Sequence; identical to SEQ ID NO: 1322
  Synthetic

SEQ ID NO: 1367 - RNA, 42 nt, Artificial Sequence; identical to SEQ ID NO: 1322
  Synthetic

SEQ ID NO: 1368 - RNA, 42 nt, Artificial Sequence; identical to SEQ ID NO: 1322
  Synthetic

SEQ ID NO: 1369 - RNA, 42 nt, Artificial Sequence; identical to SEQ ID NO: 1322
  Synthetic

SEQ ID NO: 1370 - RNA, 42 nt, Artificial Sequence; identical to SEQ ID NO: 1322
  Synthetic

SEQ ID NO: 1371 - RNA, 42 nt, Artificial Sequence; identical to SEQ ID NO: 1322
  Synthetic

SEQ ID NO: 1372 - RNA, 42 nt, Artificial Sequence; identical to SEQ ID NO: 1322
  Synthetic

SEQ ID NO: 1373 - RNA, 42 nt, Artificial Sequence; identical to SEQ ID NO: 1322
  Synthetic

SEQ ID NO: 1374 - RNA, 42 nt, Artificial Sequence; identical to SEQ ID NO: 1322
  Synthetic

SEQ ID NO: 1375 - RNA, 42 nt, Artificial Sequence; identical to SEQ ID NO: 1322
  Synthetic

SEQ ID NO: 1376 - RNA, 42 nt, Artificial Sequence; identical to SEQ ID NO: 1322
  Synthetic

SEQ ID NO: 1377 - RNA, 42 nt, Artificial Sequence; identical to SEQ ID NO: 1322
  Synthetic

SEQ ID NO: 1378 - RNA, 42 nt, Artificial Sequence; identical to SEQ ID NO: 1322
  Synthetic

SEQ ID NO: 1379 - RNA, 42 nt, Artificial Sequence; identical to SEQ ID NO: 1322
  Synthetic

SEQ ID NO: 1380 - RNA, 42 nt, Artificial Sequence; identical to SEQ ID NO: 1322
  Synthetic

SEQ ID NO: 1381 - RNA, 42 nt, Artificial Sequence; identical to SEQ ID NO: 1322
  Synthetic

SEQ ID NO: 1382 - RNA, 42 nt, Artificial Sequence; identical to SEQ ID NO: 1322
  Synthetic

SEQ ID NO: 1383 - RNA, 42 nt, Artificial Sequence; identical to SEQ ID NO: 1322
  Synthetic

SEQ ID NO: 1384 - RNA, 42 nt, Artificial Sequence; identical to SEQ ID NO: 1322
  Synthetic

SEQ ID NO: 1385 - RNA, 42 nt, Artificial Sequence; identical to SEQ ID NO: 1322
  Synthetic

SEQ ID NO: 1386 - RNA, 42 nt, Artificial Sequence; identical to SEQ ID NO: 1322
  Synthetic

SEQ ID NO: 1387 - RNA, 42 nt, Artificial Sequence; identical to SEQ ID NO: 1322
  Synthetic

SEQ ID NO: 1388 - RNA, 42 nt, Artificial Sequence; identical to SEQ ID NO: 1322
  Synthetic

SEQ ID NO: 1389 - RNA, 42 nt, Artificial Sequence; identical to SEQ ID NO: 1322
  Synthetic

SEQ ID NO: 1390 - RNA, 42 nt, Artificial Sequence; identical to SEQ ID NO: 1322
  Synthetic

SEQ ID NO: 1391 - RNA, 42 nt, Artificial Sequence; identical to SEQ ID NO: 1322
  Synthetic

SEQ ID NO: 1392 - RNA, 42 nt, Artificial Sequence; identical to SEQ ID NO: 1322
  Synthetic

SEQ ID NO: 1393 - RNA, 42 nt, Artificial Sequence; identical to SEQ ID NO: 1322
  Synthetic

SEQ ID NO: 1394 - RNA, 42 nt, Artificial Sequence; identical to SEQ ID NO: 1322
  Synthetic

SEQ ID NO: 1395 - RNA, 42 nt, Artificial Sequence; identical to SEQ ID NO: 1322
  Synthetic

SEQ ID NO: 1396 - RNA, 42 nt, Artificial Sequence; identical to SEQ ID NO: 1322
  Synthetic

SEQ ID NO: 1397 - RNA, 42 nt, Artificial Sequence; identical to SEQ ID NO: 1322
  Synthetic

SEQ ID NO: 1398 - RNA, 42 nt, Artificial Sequence; identical to SEQ ID NO: 1322
  Synthetic

SEQ ID NO: 1399 - RNA, 42 nt, Artificial Sequence; identical to SEQ ID NO: 1322
  Synthetic

SEQ ID NO: 1400 - RNA, 42 nt, Artificial Sequence; identical to SEQ ID NO: 1322
  Synthetic

SEQ ID NO: 1401 - RNA, 42 nt, Artificial Sequence; identical to SEQ ID NO: 1322
  Synthetic

SEQ ID NO: 1402 - RNA, 42 nt, Artificial Sequence; identical to SEQ ID NO: 1322
  Synthetic

SEQ ID NO: 1403 - RNA, 42 nt, Artificial Sequence; identical to SEQ ID NO: 1322
  Synthetic

SEQ ID NO: 1404 - RNA, 42 nt, Artificial Sequence; identical to SEQ ID NO: 1322
  Synthetic

SEQ ID NO: 1405 - RNA, 42 nt, Artificial Sequence; identical to SEQ ID NO: 1322
  Synthetic

SEQ ID NO: 1406 - RNA, 42 nt, Artificial Sequence; identical to SEQ ID NO: 1322
  Synthetic

SEQ ID NO: 1407 - RNA, 42 nt, Artificial Sequence; identical to SEQ ID NO: 1322
  Synthetic

SEQ ID NO: 1408 - RNA, 42 nt, Artificial Sequence; identical to SEQ ID NO: 1322
  Synthetic

SEQ ID NO: 1409 - RNA, 42 nt, Artificial Sequence; identical to SEQ ID NO: 1322
  Synthetic

SEQ ID NO: 1410 - RNA, 42 nt, Artificial Sequence; identical to SEQ ID NO: 1322
  Synthetic

SEQ ID NO: 1411 - RNA, 42 nt, Artificial Sequence; identical to SEQ ID NO: 1322
  Synthetic

SEQ ID NO: 1412 - RNA, 42 nt, Artificial Sequence; identical to SEQ ID NO: 1322
  Synthetic

SEQ ID NO: 1413 - RNA, 42 nt, Artificial Sequence; identical to SEQ ID NO: 1322
  Synthetic

SEQ ID NO: 1414 - RNA, 42 nt, Artificial Sequence; identical to SEQ ID NO: 1322
  Synthetic

SEQ ID NO: 1415 - RNA, 42 nt, Artificial Sequence; identical to SEQ ID NO: 1322
  Synthetic

SEQ ID NO: 1416 - RNA, 42 nt, Artificial Sequence; identical to SEQ ID NO: 1322
  Synthetic

SEQ ID NO: 1417 - RNA, 42 nt, Artificial Sequence; identical to SEQ ID NO: 1322
  Synthetic

SEQ ID NO: 1418 - RNA, 42 nt, Artificial Sequence; identical to SEQ ID NO: 1322
  Synthetic

SEQ ID NO: 1419 - RNA, 42 nt, Artificial Sequence; identical to SEQ ID NO: 1322
  Synthetic

SEQ ID NO: 1420 - RNA, 42 nt, Artificial Sequence; identical to SEQ ID NO: 1322
  Synthetic

SEQ ID NO: 1421 - RNA, 42 nt, Artificial Sequence; identical to SEQ ID NO: 1322
  Synthetic

SEQ ID NO: 1422 - RNA, 42 nt, Artificial Sequence; identical to SEQ ID NO: 1322
  Synthetic

SEQ ID NO: 1423 - RNA, 42 nt, Artificial Sequence; identical to SEQ ID NO: 1322
  Synthetic

SEQ ID NO: 1424 - RNA, 42 nt, Artificial Sequence; identical to SEQ ID NO: 1322
  Synthetic

SEQ ID NO: 1425 - RNA, 42 nt, Artificial Sequence; identical to SEQ ID NO: 1322
  Synthetic

SEQ ID NO: 1426 - RNA, 42 nt, Artificial Sequence; identical to SEQ ID NO: 1322
  Synthetic

SEQ ID NO: 1427 - RNA, 42 nt, Artificial Sequence; identical to SEQ ID NO: 1322
  Synthetic

SEQ ID NO: 1428 - RNA, 42 nt, Artificial Sequence; identical to SEQ ID NO: 1322
  Synthetic

SEQ ID NO: 1429 - RNA, 42 nt, Artificial Sequence; identical to SEQ ID NO: 1322
  Synthetic

SEQ ID NO: 1430 - RNA, 42 nt, Artificial Sequence; identical to SEQ ID NO: 1322
  Synthetic

SEQ ID NO: 1431 - RNA, 42 nt, Artificial Sequence; identical to SEQ ID NO: 1322
  Synthetic

SEQ ID NO: 1432 - RNA, 42 nt, Artificial Sequence; identical to SEQ ID NO: 1322
  Synthetic

SEQ ID NO: 1433 - RNA, 42 nt, Artificial Sequence; identical to SEQ ID NO: 1322
  Synthetic

SEQ ID NO: 1434 - RNA, 42 nt, Artificial Sequence; identical to SEQ ID NO: 1322
  Synthetic

SEQ ID NO: 1435 - RNA, 42 nt, Artificial Sequence; identical to SEQ ID NO: 1322
  Synthetic

SEQ ID NO: 1436 - RNA, 42 nt, Artificial Sequence; identical to SEQ ID NO: 1322
  Synthetic

SEQ ID NO: 1437 - RNA, 42 nt, Artificial Sequence; identical to SEQ ID NO: 1322
  Synthetic

SEQ ID NO: 1438 - RNA, 42 nt, Artificial Sequence; identical to SEQ ID NO: 1322
  Synthetic

SEQ ID NO: 1439 - RNA, 42 nt, Artificial Sequence; identical to SEQ ID NO: 1322
  Synthetic

SEQ ID NO: 1440 - RNA, 42 nt, Artificial Sequence; identical to SEQ ID NO: 1322
  Synthetic

SEQ ID NO: 1441 - RNA, 42 nt, Artificial Sequence; identical to SEQ ID NO: 1322
  Synthetic

SEQ ID NO: 1442 - RNA, 42 nt, Artificial Sequence; identical to SEQ ID NO: 1322
  Synthetic

SEQ ID NO: 1443 - RNA, 42 nt, Artificial Sequence; identical to SEQ ID NO: 1322
  Synthetic

SEQ ID NO: 1444 - RNA, 42 nt, Artificial Sequence; identical to SEQ ID NO: 1322
  Synthetic

SEQ ID NO: 1445 - RNA, 42 nt, Artificial Sequence; identical to SEQ ID NO: 1322
  Synthetic

SEQ ID NO: 1446 - RNA, 42 nt, Artificial Sequence; identical to SEQ ID NO: 1322
  Synthetic

SEQ ID NO: 1447 - RNA, 42 nt, Artificial Sequence; identical to SEQ ID NO: 1322
  Synthetic

SEQ ID NO: 1448 - RNA, 42 nt, Artificial Sequence; identical to SEQ ID NO: 1322
  Synthetic

SEQ ID NO: 1449 - RNA, 42 nt, Artificial Sequence; identical to SEQ ID NO: 1322
  Synthetic

SEQ ID NO: 1450 - RNA, 42 nt, Artificial Sequence; identical to SEQ ID NO: 1322
  Synthetic

SEQ ID NO: 1451 - RNA, 42 nt, Artificial Sequence; identical to SEQ ID NO: 1322
  Synthetic

SEQ ID NO: 1452 - RNA, 42 nt, Artificial Sequence; identical to SEQ ID NO: 1322
  Synthetic

SEQ ID NO: 1453 - RNA, 42 nt, Artificial Sequence; identical to SEQ ID NO: 1322
  Synthetic

SEQ ID NO: 1454 - RNA, 42 nt, Artificial Sequence; identical to SEQ ID NO: 1322
  Synthetic

SEQ ID NO: 1455 - RNA, 42 nt, Artificial Sequence; identical to SEQ ID NO: 1322
  Synthetic

SEQ ID NO: 1456 - RNA, 42 nt, Artificial Sequence; identical to SEQ ID NO: 1322
  Synthetic

SEQ ID NO: 1457 - RNA, 42 nt, Artificial Sequence; identical to SEQ ID NO: 1322
  Synthetic

SEQ ID NO: 1458 - RNA, 42 nt, Artificial Sequence; identical to SEQ ID NO: 1322
  Synthetic

SEQ ID NO: 1459 - RNA, 42 nt, Artificial Sequence; identical to SEQ ID NO: 1322
  Synthetic

SEQ ID NO: 1460 - RNA, 42 nt, Artificial Sequence; identical to SEQ ID NO: 1322
  Synthetic

SEQ ID NO: 1461 - RNA, 42 nt, Artificial Sequence; identical to SEQ ID NO: 1322
  Synthetic

SEQ ID NO: 1462 - RNA, 42 nt, Artificial Sequence; identical to SEQ ID NO: 1322
  Synthetic

SEQ ID NO: 1463 - RNA, 42 nt, Artificial Sequence; identical to SEQ ID NO: 1322
  Synthetic

SEQ ID NO: 1464 - RNA, 42 nt, Artificial Sequence; identical to SEQ ID NO: 1322
  Synthetic

SEQ ID NO: 1465 - RNA, 42 nt, Artificial Sequence; identical to SEQ ID NO: 1322
  Synthetic

SEQ ID NO: 1466 - RNA, 42 nt, Artificial Sequence; identical to SEQ ID NO: 1322
  Synthetic

SEQ ID NO: 1467 - RNA, 42 nt, Artificial Sequence; identical to SEQ ID NO: 1322
  Synthetic

SEQ ID NO: 1468 - RNA, 42 nt, Artificial Sequence; identical to SEQ ID NO: 1322
  Synthetic

SEQ ID NO: 1469 - RNA, 42 nt, Artificial Sequence; identical to SEQ ID NO: 1322
  Synthetic

SEQ ID NO: 1470 - RNA, 42 nt, Artificial Sequence; identical to SEQ ID NO: 1322
  Synthetic

SEQ ID NO: 1471 - RNA, 42 nt, Artificial Sequence; identical to SEQ ID NO: 1322
  Synthetic

SEQ ID NO: 1472 - RNA, 42 nt, Artificial Sequence; identical to SEQ ID NO: 1322
  Synthetic

SEQ ID NO: 1473 - RNA, 42 nt, Artificial Sequence; identical to SEQ ID NO: 1322
  Synthetic

SEQ ID NO: 1474 - RNA, 42 nt, Artificial Sequence; identical to SEQ ID NO: 1322
  Synthetic

SEQ ID NO: 1475 - RNA, 42 nt, Artificial Sequence; identical to SEQ ID NO: 1322
  Synthetic

SEQ ID NO: 1476 - RNA, 42 nt, Artificial Sequence; identical to SEQ ID NO: 1322
  Synthetic

SEQ ID NO: 1477 - RNA, 42 nt, Artificial Sequence; identical to SEQ ID NO: 1322
  Synthetic

SEQ ID NO: 1478 - RNA, 42 nt, Artificial Sequence; identical to SEQ ID NO: 1322
  Synthetic

SEQ ID NO: 1479 - RNA, 42 nt, Artificial Sequence; identical to SEQ ID NO: 1322
  Synthetic

SEQ ID NO: 1480 - RNA, 42 nt, Artificial Sequence; identical to SEQ ID NO: 1322
  Synthetic

SEQ ID NO: 1481 - RNA, 42 nt, Artificial Sequence; identical to SEQ ID NO: 1322
  Synthetic

SEQ ID NO: 1482 - RNA, 42 nt, Artificial Sequence; identical to SEQ ID NO: 1322
  Synthetic

SEQ ID NO: 1483 - RNA, 42 nt, Artificial Sequence; identical to SEQ ID NO: 1322
  Synthetic

SEQ ID NO: 1484 - RNA, 42 nt, Artificial Sequence; identical to SEQ ID NO: 1322
  Synthetic

SEQ ID NO: 1485 - RNA, 42 nt, Artificial Sequence; identical to SEQ ID NO: 1322
  Synthetic

SEQ ID NO: 1486 - RNA, 42 nt, Artificial Sequence; identical to SEQ ID NO: 1322
  Synthetic

SEQ ID NO: 1487 - RNA, 42 nt, Artificial Sequence; identical to SEQ ID NO: 1322
  Synthetic

SEQ ID NO: 1488 - RNA, 42 nt, Artificial Sequence; identical to SEQ ID NO: 1322
  Synthetic

SEQ ID NO: 1489 - RNA, 42 nt, Artificial Sequence; identical to SEQ ID NO: 1322
  Synthetic

SEQ ID NO: 1490 - RNA, 42 nt, Artificial Sequence; identical to SEQ ID NO: 1322
  Synthetic

SEQ ID NO: 1491 - RNA, 42 nt, Artificial Sequence; identical to SEQ ID NO: 1322
  Synthetic

SEQ ID NO: 1492 - RNA, 42 nt, Artificial Sequence; identical to SEQ ID NO: 1322
  Synthetic

SEQ ID NO: 1493 - RNA, 42 nt, Artificial Sequence; identical to SEQ ID NO: 1322
  Synthetic

SEQ ID NO: 1494 - RNA, 42 nt, Artificial Sequence; identical to SEQ ID NO: 1322
  Synthetic

SEQ ID NO: 1495 - RNA, 42 nt, Artificial Sequence; identical to SEQ ID NO: 1322
  Synthetic

SEQ ID NO: 1496 - RNA, 42 nt, Artificial Sequence; identical to SEQ ID NO: 1322
  Synthetic

SEQ ID NO: 1497 - RNA, 42 nt, Artificial Sequence; identical to SEQ ID NO: 1322
  Synthetic

SEQ ID NO: 1498 - RNA, 42 nt, Artificial Sequence; identical to SEQ ID NO: 1322
  Synthetic

SEQ ID NO: 1499 - RNA, 42 nt, Artificial Sequence; identical to SEQ ID NO: 1322
  Synthetic

SEQ ID NO: 1500 - RNA, 42 nt, Artificial Sequence; identical to SEQ ID NO: 1322
  Synthetic

SEQ ID NO: 1501 - RNA, 42 nt, Artificial Sequence; identical to SEQ ID NO: 1322
  Synthetic

SEQ ID NO: 1502 - RNA, 42 nt, Artificial Sequence; identical to SEQ ID NO: 1322
  Synthetic

SEQ ID NO: 1503 - RNA, 42 nt, Artificial Sequence; identical to SEQ ID NO: 1322
  Synthetic

SEQ ID NO: 1504 - RNA, 42 nt, Artificial Sequence; identical to SEQ ID NO: 1322
  Synthetic

SEQ ID NO: 1505 - RNA, 42 nt, Artificial Sequence; identical to SEQ ID NO: 1322
  Synthetic

SEQ ID NO: 1506 - RNA, 42 nt, Artificial Sequence; identical to SEQ ID NO: 1322
  Synthetic

SEQ ID NO: 1507 - RNA, 42 nt, Artificial Sequence; identical to SEQ ID NO: 1322
  Synthetic

SEQ ID NO: 1508 - RNA, 42 nt, Artificial Sequence; identical to SEQ ID NO: 1322
  Synthetic

SEQ ID NO: 1509 - RNA, 42 nt, Artificial Sequence; identical to SEQ ID NO: 1322
  Synthetic

SEQ ID NO: 1510 - RNA, 42 nt, Artificial Sequence; identical to SEQ ID NO: 1322
  Synthetic

SEQ ID NO: 1511 - RNA, 42 nt, Artificial Sequence; identical to SEQ ID NO: 1322
  Synthetic

SEQ ID NO: 1512 - RNA, 42 nt, Artificial Sequence; identical to SEQ ID NO: 1322
  Synthetic

SEQ ID NO: 1513 - RNA, 42 nt, Artificial Sequence; identical to SEQ ID NO: 1322
  Synthetic

SEQ ID NO: 1514 - RNA, 42 nt, Artificial Sequence; identical to SEQ ID NO: 1322
  Synthetic

SEQ ID NO: 1515 - RNA, 42 nt, Artificial Sequence; identical to SEQ ID NO: 1322
  Synthetic

SEQ ID NO: 1516 - RNA, 42 nt, Artificial Sequence; identical to SEQ ID NO: 1322
  Synthetic

SEQ ID NO: 1517 - RNA, 42 nt, Artificial Sequence; identical to SEQ ID NO: 1322
  Synthetic

SEQ ID NO: 1518 - RNA, 42 nt, Artificial Sequence; identical to SEQ ID NO: 1322
  Synthetic

SEQ ID NO: 1519 - RNA, 42 nt, Artificial Sequence; identical to SEQ ID NO: 1322
  Synthetic

SEQ ID NO: 1520 - RNA, 42 nt, Artificial Sequence; identical to SEQ ID NO: 1322
  Synthetic

SEQ ID NO: 1521 - RNA, 42 nt, Artificial Sequence; identical to SEQ ID NO: 1322
  Synthetic

SEQ ID NO: 1522 - RNA, 42 nt, Artificial Sequence; identical to SEQ ID NO: 1322
  Synthetic

SEQ ID NO: 1523 - RNA, 42 nt, Artificial Sequence; identical to SEQ ID NO: 1322
  Synthetic

SEQ ID NO: 1524 - RNA, 42 nt, Artificial Sequence; identical to SEQ ID NO: 1322
  Synthetic

SEQ ID NO: 1525 - RNA, 42 nt, Artificial Sequence; identical to SEQ ID NO: 1322
  Synthetic

SEQ ID NO: 1526 - RNA, 42 nt, Artificial Sequence; identical to SEQ ID NO: 1322
  Synthetic

SEQ ID NO: 1527 - RNA, 42 nt, Artificial Sequence; identical to SEQ ID NO: 1322
  Synthetic

SEQ ID NO: 1528 - RNA, 42 nt, Artificial Sequence; identical to SEQ ID NO: 1322
  Synthetic

SEQ ID NO: 1529 - RNA, 42 nt, Artificial Sequence; identical to SEQ ID NO: 1322
  Synthetic

SEQ ID NO: 1530 - RNA, 42 nt, Artificial Sequence; identical to SEQ ID NO: 1322
  Synthetic

SEQ ID NO: 1531 - RNA, 42 nt, Artificial Sequence; identical to SEQ ID NO: 1322
  Synthetic

SEQ ID NO: 1532 - RNA, 42 nt, Artificial Sequence; identical to SEQ ID NO: 1322
  Synthetic

SEQ ID NO: 1533 - RNA, 42 nt, Artificial Sequence; identical to SEQ ID NO: 1322
  Synthetic

SEQ ID NO: 1534 - RNA, 42 nt, Artificial Sequence; identical to SEQ ID NO: 1322
  Synthetic

SEQ ID NO: 1535 - RNA, 42 nt, Artificial Sequence; identical to SEQ ID NO: 1322
  Synthetic

SEQ ID NO: 1536 - RNA, 42 nt, Artificial Sequence; identical to SEQ ID NO: 1322
  Synthetic

SEQ ID NO: 1537 - RNA, 42 nt, Artificial Sequence; identical to SEQ ID NO: 1322
  Synthetic

SEQ ID NO: 1538 - RNA, 42 nt, Artificial Sequence; identical to SEQ ID NO: 1322
  Synthetic

SEQ ID NO: 1539 - RNA, 42 nt, Artificial Sequence; identical to SEQ ID NO: 1322
  Synthetic

SEQ ID NO: 1540 - RNA, 42 nt, Artificial Sequence; identical to SEQ ID NO: 1322
  Synthetic

SEQ ID NO: 1541 - RNA, 42 nt, Artificial Sequence; identical to SEQ ID NO: 1322
  Synthetic

SEQ ID NO: 1542 - RNA, 42 nt, Artificial Sequence; identical to SEQ ID NO: 1322
  Synthetic

SEQ ID NO: 1543 - RNA, 42 nt, Artificial Sequence; identical to SEQ ID NO: 1322
  Synthetic

SEQ ID NO: 1544 - RNA, 42 nt, Artificial Sequence; identical to SEQ ID NO: 1322
  Synthetic

SEQ ID NO: 1545 - RNA, 42 nt, Artificial Sequence; identical to SEQ ID NO: 1322
  Synthetic

SEQ ID NO: 1546 - RNA, 42 nt, Artificial Sequence; identical to SEQ ID NO: 1322
  Synthetic

SEQ ID NO: 1547 - RNA, 42 nt, Artificial Sequence; identical to SEQ ID NO: 1322
  Synthetic

SEQ ID NO: 1548 - RNA, 42 nt, Artificial Sequence; identical to SEQ ID NO: 1322
  Synthetic

SEQ ID NO: 1549 - RNA, 42 nt, Artificial Sequence; identical to SEQ ID NO: 1322
  Synthetic

SEQ ID NO: 1550 - RNA, 42 nt, Artificial Sequence; identical to SEQ ID NO: 1322
  Synthetic

SEQ ID NO: 1551 - RNA, 42 nt, Artificial Sequence; identical to SEQ ID NO: 1322
  Synthetic

SEQ ID NO: 1552 - RNA, 42 nt, Artificial Sequence; identical to SEQ ID NO: 1322
  Synthetic

SEQ ID NO: 1553 - RNA, 42 nt, Artificial Sequence; identical to SEQ ID NO: 1322
  Synthetic

SEQ ID NO: 1554 - RNA, 42 nt, Artificial Sequence; identical to SEQ ID NO: 1322
  Synthetic

SEQ ID NO: 1555 - RNA, 42 nt, Artificial Sequence; identical to SEQ ID NO: 1322
  Synthetic

SEQ ID NO: 1556 - RNA, 42 nt, Artificial Sequence; identical to SEQ ID NO: 1322
  Synthetic

SEQ ID NO: 1557 - RNA, 42 nt, Artificial Sequence; identical to SEQ ID NO: 1322
  Synthetic

SEQ ID NO: 1558 - RNA, 42 nt, Artificial Sequence; identical to SEQ ID NO: 1322
  Synthetic

SEQ ID NO: 1559 - RNA, 42 nt, Artificial Sequence; identical to SEQ ID NO: 1322
  Synthetic

SEQ ID NO: 1560 - RNA, 42 nt, Artificial Sequence; identical to SEQ ID NO: 1322
  Synthetic

SEQ ID NO: 1561 - RNA, 42 nt, Artificial Sequence; identical to SEQ ID NO: 1322
  Synthetic

SEQ ID NO: 1562 - RNA, 42 nt, Artificial Sequence; identical to SEQ ID NO: 1322
  Synthetic

SEQ ID NO: 1563 - RNA, 42 nt, Artificial Sequence; identical to SEQ ID NO: 1322
  Synthetic

SEQ ID NO: 1564 - RNA, 42 nt, Artificial Sequence; identical to SEQ ID NO: 1322
  Synthetic

SEQ ID NO: 1565 - RNA, 42 nt, Artificial Sequence; identical to SEQ ID NO: 1322
  Synthetic

SEQ ID NO: 1566 - RNA, 42 nt, Artificial Sequence; identical to SEQ ID NO: 1322
  Synthetic

SEQ ID NO: 1567 - RNA, 42 nt, Artificial Sequence; identical to SEQ ID NO: 1322
  Synthetic

SEQ ID NO: 1568 - RNA, 42 nt, Artificial Sequence; identical to SEQ ID NO: 1322
  Synthetic

SEQ ID NO: 1569 - RNA, 42 nt, Artificial Sequence; identical to SEQ ID NO: 1322
  Synthetic

SEQ ID NO: 1570 - RNA, 42 nt, Artificial Sequence; identical to SEQ ID NO: 1322
  Synthetic

SEQ ID NO: 1571 - RNA, 42 nt, Artificial Sequence; identical to SEQ ID NO: 1322
  Synthetic

SEQ ID NO: 1572 - RNA, 42 nt, Artificial Sequence; identical to SEQ ID NO: 1322
  Synthetic

SEQ ID NO: 1573 - RNA, 42 nt, Artificial Sequence; identical to SEQ ID NO: 1322
  Synthetic

SEQ ID NO: 1574 - RNA, 42 nt, Artificial Sequence; identical to SEQ ID NO: 1322
  Synthetic

SEQ ID NO: 1575 - RNA, 42 nt, Artificial Sequence; identical to SEQ ID NO: 1322
  Synthetic

SEQ ID NO: 1576 - RNA, 42 nt, Artificial Sequence; identical to SEQ ID NO: 1322
  Synthetic

SEQ ID NO: 1577 - RNA, 42 nt, Artificial Sequence; identical to SEQ ID NO: 1322
  Synthetic

SEQ ID NO: 1578 - RNA, 42 nt, Artificial Sequence; identical to SEQ ID NO: 1322
  Synthetic

SEQ ID NO: 1579 - RNA, 42 nt, Artificial Sequence; identical to SEQ ID NO: 1322
  Synthetic

SEQ ID NO: 1580 - RNA, 42 nt, Artificial Sequence; identical to SEQ ID NO: 1322
  Synthetic

SEQ ID NO: 1581 - RNA, 42 nt, Artificial Sequence; identical to SEQ ID NO: 1322
  Synthetic

SEQ ID NO: 1582 - RNA, 42 nt, Artificial Sequence; identical to SEQ ID NO: 1322
  Synthetic

SEQ ID NO: 1583 - RNA, 42 nt, Artificial Sequence; identical to SEQ ID NO: 1322
  Synthetic

SEQ ID NO: 1584 - RNA, 42 nt, Artificial Sequence; identical to SEQ ID NO: 1322
  Synthetic

SEQ ID NO: 1585 - RNA, 42 nt, Artificial Sequence; identical to SEQ ID NO: 1322
  Synthetic

SEQ ID NO: 1586 - RNA, 42 nt, Artificial Sequence; identical to SEQ ID NO: 1322
  Synthetic

SEQ ID NO: 1587 - RNA, 42 nt, Artificial Sequence; identical to SEQ ID NO: 1322
  Synthetic

SEQ ID NO: 1588 - RNA, 42 nt, Artificial Sequence; identical to SEQ ID NO: 1322
  Synthetic

SEQ ID NO: 1589 - RNA, 42 nt, Artificial Sequence; identical to SEQ ID NO: 1322
  Synthetic

SEQ ID NO: 1590 - RNA, 42 nt, Artificial Sequence; identical to SEQ ID NO: 1322
  Synthetic

SEQ ID NO: 1591 - RNA, 42 nt, Artificial Sequence; identical to SEQ ID NO: 1322
  Synthetic

SEQ ID NO: 1592 - RNA, 42 nt, Artificial Sequence; identical to SEQ ID NO: 1322
  Synthetic

SEQ ID NO: 1593 - RNA, 42 nt, Artificial Sequence; identical to SEQ ID NO: 1322
  Synthetic

SEQ ID NO: 1594 - RNA, 42 nt, Artificial Sequence; identical to SEQ ID NO: 1322
  Synthetic

SEQ ID NO: 1595 - RNA, 42 nt, Artificial Sequence; identical to SEQ ID NO: 1322
  Synthetic

SEQ ID NO: 1596 - RNA, 42 nt, Artificial Sequence; identical to SEQ ID NO: 1322
  Synthetic

SEQ ID NO: 1597 - RNA, 42 nt, Artificial Sequence; identical to SEQ ID NO: 1322
  Synthetic

SEQ ID NO: 1598 - RNA, 42 nt, Artificial Sequence; identical to SEQ ID NO: 1322
  Synthetic

SEQ ID NO: 1599 - RNA, 42 nt, Artificial Sequence; identical to SEQ ID NO: 1322
  Synthetic

SEQ ID NO: 1600 - RNA, 42 nt, Artificial Sequence; identical to SEQ ID NO: 1322
  Synthetic

SEQ ID NO: 1601 - RNA, 42 nt, Artificial Sequence; identical to SEQ ID NO: 1322
  Synthetic

SEQ ID NO: 1602 - RNA, 42 nt, Artificial Sequence; identical to SEQ ID NO: 1322
  Synthetic

SEQ ID NO: 1603 - RNA, 42 nt, Artificial Sequence; identical to SEQ ID NO: 1322
  Synthetic

SEQ ID NO: 1604 - RNA, 42 nt, Artificial Sequence; identical to SEQ ID NO: 1322
  Synthetic

SEQ ID NO: 1605 - RNA, 42 nt, Artificial Sequence
  Synthetic
gugagucuggagagcugcauguuuuagagcuaugcuguuuug

SEQ ID NO: 1606 - RNA, 42 nt, Artificial Sequence; identical to SEQ ID NO: 1605
  Synthetic

SEQ ID NO: 1607 - RNA, 42 nt, Artificial Sequence; identical to SEQ ID NO: 1605
  Synthetic

SEQ ID NO: 1608 - RNA, 42 nt, Artificial Sequence; identical to SEQ ID NO: 1605
  Synthetic

SEQ ID NO: 1609 - RNA, 42 nt, Artificial Sequence; identical to SEQ ID NO: 1605
  Synthetic

SEQ ID NO: 1610 - RNA, 42 nt, Artificial Sequence; identical to SEQ ID NO: 1605
  Synthetic

SEQ ID NO: 1611 - RNA, 42 nt, Artificial Sequence; identical to SEQ ID NO: 1605
  Synthetic

SEQ ID NO: 1612 - RNA, 42 nt, Artificial Sequence; identical to SEQ ID NO: 1605
  Synthetic

SEQ ID NO: 1613 - RNA, 42 nt, Artificial Sequence; identical to SEQ ID NO: 1605
  Synthetic

SEQ ID NO: 1614 - RNA, 42 nt, Artificial Sequence; identical to SEQ ID NO: 1605
  Synthetic

SEQ ID NO: 1615 - RNA, 42 nt, Artificial Sequence; identical to SEQ ID NO: 1605
  Synthetic

SEQ ID NO: 1616 - RNA, 42 nt, Artificial Sequence; identical to SEQ ID NO: 1605
  Synthetic

SEQ ID NO: 1617 - RNA, 42 nt, Artificial Sequence; identical to SEQ ID NO: 1605
  Synthetic

SEQ ID NO: 1618 - RNA, 42 nt, Artificial Sequence; identical to SEQ ID NO: 1605
  Synthetic

SEQ ID NO: 1619 - RNA, 42 nt, Artificial Sequence; identical to SEQ ID NO: 1605
  Synthetic

SEQ ID NO: 1620 - RNA, 42 nt, Artificial Sequence; identical to SEQ ID NO: 1605
  Synthetic

SEQ ID NO: 1621 - RNA, 42 nt, Artificial Sequence; identical to SEQ ID NO: 1605
  Synthetic

SEQ ID NO: 1622 - RNA, 42 nt, Artificial Sequence; identical to SEQ ID NO: 1605
  Synthetic

SEQ ID NO: 1623 - RNA, 42 nt, Artificial Sequence; identical to SEQ ID NO: 1605
  Synthetic

SEQ ID NO: 1624 - RNA, 42 nt, Artificial Sequence; identical to SEQ ID NO: 1605
  Synthetic

SEQ ID NO: 1625 - RNA, 42 nt, Artificial Sequence; identical to SEQ ID NO: 1605
  Synthetic

SEQ ID NO: 1626 - RNA, 42 nt, Artificial Sequence; identical to SEQ ID NO: 1605
  Synthetic

SEQ ID NO: 1627 - RNA, 42 nt, Artificial Sequence; identical to SEQ ID NO: 1605
  Synthetic

SEQ ID NO: 1628 - RNA, 42 nt, Artificial Sequence; identical to SEQ ID NO: 1605
  Synthetic

SEQ ID NO: 1629 - RNA, 42 nt, Artificial Sequence; identical to SEQ ID NO: 1605
  Synthetic

SEQ ID NO: 1630 - RNA, 42 nt, Artificial Sequence; identical to SEQ ID NO: 1605
  Synthetic

SEQ ID NO: 1631 - RNA, 42 nt, Artificial Sequence; identical to SEQ ID NO: 1605
  Synthetic

SEQ ID NO: 1632 - RNA, 42 nt, Artificial Sequence; identical to SEQ ID NO: 1605
  Synthetic

SEQ ID NO: 1633 - RNA, 42 nt, Artificial Sequence; identical to SEQ ID NO: 1605
  Synthetic

SEQ ID NO: 1634 - RNA, 42 nt, Artificial Sequence; identical to SEQ ID NO: 1605
  Synthetic

SEQ ID NO: 1635 - RNA, 42 nt, Artificial Sequence; identical to SEQ ID NO: 1605
  Synthetic

SEQ ID NO: 1636 - RNA, 42 nt, Artificial Sequence; identical to SEQ ID NO: 1605
  Synthetic

SEQ ID NO: 1637 - RNA, 42 nt, Artificial Sequence; identical to SEQ ID NO: 1605
  Synthetic

SEQ ID NO: 1638 - RNA, 42 nt, Artificial Sequence; identical to SEQ ID NO: 1605
  Synthetic

SEQ ID NO: 1639 - RNA, 42 nt, Artificial Sequence; identical to SEQ ID NO: 1605
  Synthetic

SEQ ID NO: 1640 - RNA, 42 nt, Artificial Sequence; identical to SEQ ID NO: 1605
  Synthetic

SEQ ID NO: 1641 - RNA, 42 nt, Artificial Sequence; identical to SEQ ID NO: 1605
  Synthetic

SEQ ID NO: 1642 - RNA, 42 nt, Artificial Sequence; identical to SEQ ID NO: 1605
  Synthetic

SEQ ID NO: 1643 - RNA, 42 nt, Artificial Sequence; identical to SEQ ID NO: 1605
  Synthetic

SEQ ID NO: 1644 - RNA, 42 nt, Artificial Sequence; identical to SEQ ID NO: 1605
  Synthetic

SEQ ID NO: 1645 - RNA, 42 nt, Artificial Sequence; identical to SEQ ID NO: 1605
  Synthetic

SEQ ID NO: 1646 - RNA, 42 nt, Artificial Sequence; identical to SEQ ID NO: 1605
  Synthetic

SEQ ID NO: 1647 - RNA, 42 nt, Artificial Sequence; identical to SEQ ID NO: 1605
  Synthetic

SEQ ID NO: 1648 - RNA, 42 nt, Artificial Sequence; identical to SEQ ID NO: 1605
  Synthetic

SEQ ID NO: 1649 - RNA, 42 nt, Artificial Sequence; identical to SEQ ID NO: 1605
  Synthetic

SEQ ID NO: 1650 - RNA, 42 nt, Artificial Sequence; identical to SEQ ID NO: 1605
  Synthetic

SEQ ID NO: 1651 - RNA, 42 nt, Artificial Sequence; identical to SEQ ID NO: 1605
  Synthetic

SEQ ID NO: 1652 - RNA, 42 nt, Artificial Sequence; identical to SEQ ID NO: 1605
  Synthetic

SEQ ID NO: 1653 - RNA, 42 nt, Artificial Sequence; identical to SEQ ID NO: 1605
  Synthetic

SEQ ID NO: 1654 - RNA, 42 nt, Artificial Sequence; identical to SEQ ID NO: 1605
  Synthetic

SEQ ID NO: 1655 - RNA, 42 nt, Artificial Sequence; identical to SEQ ID NO: 1605
  Synthetic

SEQ ID NO: 1656 - RNA, 42 nt, Artificial Sequence; identical to SEQ ID NO: 1605
  Synthetic

SEQ ID NO: 1657 - RNA, 42 nt, Artificial Sequence; identical to SEQ ID NO: 1605
  Synthetic

SEQ ID NO: 1658 - RNA, 42 nt, Artificial Sequence; identical to SEQ ID NO: 1605
  Synthetic

SEQ ID NO: 1659 - RNA, 42 nt, Artificial Sequence; identical to SEQ ID NO: 1605
  Synthetic

SEQ ID NO: 1660 - RNA, 42 nt, Artificial Sequence; identical to SEQ ID NO: 1605
  Synthetic

SEQ ID NO: 1661 - RNA, 42 nt, Artificial Sequence; identical to SEQ ID NO: 1605
  Synthetic

SEQ ID NO: 1662 - RNA, 42 nt, Artificial Sequence; identical to SEQ ID NO: 1605
  Synthetic

SEQ ID NO: 1663 - RNA, 42 nt, Artificial Sequence; identical to SEQ ID NO: 1605
  Synthetic

SEQ ID NO: 1664 - RNA, 42 nt, Artificial Sequence; identical to SEQ ID NO: 1605
  Synthetic

SEQ ID NO: 1665 - RNA, 42 nt, Artificial Sequence; identical to SEQ ID NO: 1605
  Synthetic

SEQ ID NO: 1666 - RNA, 42 nt, Artificial Sequence; identical to SEQ ID NO: 1605
  Synthetic

SEQ ID NO: 1667 - RNA, 42 nt, Artificial Sequence; identical to SEQ ID NO: 1605
  Synthetic

SEQ ID NO: 1668 - RNA, 42 nt, Artificial Sequence; identical to SEQ ID NO: 1605
  Synthetic

SEQ ID NO: 1669 - RNA, 42 nt, Artificial Sequence; identical to SEQ ID NO: 1605
  Synthetic

SEQ ID NO: 1670 - RNA, 42 nt, Artificial Sequence; identical to SEQ ID NO: 1605
  Synthetic

SEQ ID NO: 1671 - RNA, 42 nt, Artificial Sequence; identical to SEQ ID NO: 1605
  Synthetic

SEQ ID NO: 1672 - RNA, 42 nt, Artificial Sequence; identical to SEQ ID NO: 1605
  Synthetic

SEQ ID NO: 1673 - RNA, 42 nt, Artificial Sequence; identical to SEQ ID NO: 1605
  Synthetic

SEQ ID NO: 1674 - RNA, 42 nt, Artificial Sequence; identical to SEQ ID NO: 1605
  Synthetic

SEQ ID NO: 1675 - RNA, 42 nt, Artificial Sequence; identical to SEQ ID NO: 1605
  Synthetic

SEQ ID NO: 1676 - RNA, 42 nt, Artificial Sequence; identical to SEQ ID NO: 1605
  Synthetic

SEQ ID NO: 1677 - RNA, 42 nt, Artificial Sequence; identical to SEQ ID NO: 1605
  Synthetic

SEQ ID NO: 1678 - RNA, 42 nt, Artificial Sequence; identical to SEQ ID NO: 1605
  Synthetic

SEQ ID NO: 1679 - RNA, 42 nt, Artificial Sequence; identical to SEQ ID NO: 1605
  Synthetic

SEQ ID NO: 1680 - RNA, 42 nt, Artificial Sequence; identical to SEQ ID NO: 1605
  Synthetic

SEQ ID NO: 1681 - RNA, 42 nt, Artificial Sequence; identical to SEQ ID NO: 1605
  Synthetic

SEQ ID NO: 1682 - RNA, 42 nt, Artificial Sequence; identical to SEQ ID NO: 1605
  Synthetic

SEQ ID NO: 1683 - RNA, 42 nt, Artificial Sequence; identical to SEQ ID NO: 1605
  Synthetic

SEQ ID NO: 1684 - RNA, 42 nt, Artificial Sequence; identical to SEQ ID NO: 1605
  Synthetic

SEQ ID NO: 1685 - RNA, 42 nt, Artificial Sequence; identical to SEQ ID NO: 1605
  Synthetic

SEQ ID NO: 1686 - RNA, 42 nt, Artificial Sequence; identical to SEQ ID NO: 1605
  Synthetic

SEQ ID NO: 1687 - RNA, 42 nt, Artificial Sequence; identical to SEQ ID NO: 1605
  Synthetic

SEQ ID NO: 1688 - RNA, 42 nt, Artificial Sequence; identical to SEQ ID NO: 1605
  Synthetic

SEQ ID NO: 1689 - RNA, 42 nt, Artificial Sequence; identical to SEQ ID NO: 1605
  Synthetic

SEQ ID NO: 1690 - RNA, 42 nt, Artificial Sequence; identical to SEQ ID NO: 1605
  Synthetic

SEQ ID NO: 1691 - RNA, 42 nt, Artificial Sequence; identical to SEQ ID NO: 1605
  Synthetic

SEQ ID NO: 1692 - RNA, 42 nt, Artificial Sequence; identical to SEQ ID NO: 1605
  Synthetic

SEQ ID NO: 1693 - RNA, 42 nt, Artificial Sequence; identical to SEQ ID NO: 1605
  Synthetic

SEQ ID NO: 1694 - RNA, 42 nt, Artificial Sequence; identical to SEQ ID NO: 1605
  Synthetic

SEQ ID NO: 1695 - RNA, 42 nt, Artificial Sequence; identical to SEQ ID NO: 1605
  Synthetic

SEQ ID NO: 1696 - RNA, 42 nt, Artificial Sequence; identical to SEQ ID NO: 1605
  Synthetic

SEQ ID NO: 1697 - RNA, 42 nt, Artificial Sequence; identical to SEQ ID NO: 1605
  Synthetic

SEQ ID NO: 1698 - RNA, 42 nt, Artificial Sequence; identical to SEQ ID NO: 1605
  Synthetic

SEQ ID NO: 1699 - RNA, 42 nt, Artificial Sequence; identical to SEQ ID NO: 1605
  Synthetic

SEQ ID NO: 1700 - RNA, 42 nt, Artificial Sequence; identical to SEQ ID NO: 1605
  Synthetic

SEQ ID NO: 1701 - RNA, 42 nt, Artificial Sequence; identical to SEQ ID NO: 1605
  Synthetic

SEQ ID NO: 1702 - RNA, 42 nt, Artificial Sequence; identical to SEQ ID NO: 1605
  Synthetic

SEQ ID NO: 1703 - RNA, 42 nt, Artificial Sequence; identical to SEQ ID NO: 1605
  Synthetic

SEQ ID NO: 1704 - RNA, 42 nt, Artificial Sequence; identical to SEQ ID NO: 1605
  Synthetic

SEQ ID NO: 1705 - RNA, 42 nt, Artificial Sequence; identical to SEQ ID NO: 1605
  Synthetic

SEQ ID NO: 1706 - RNA, 42 nt, Artificial Sequence; identical to SEQ ID NO: 1605
  Synthetic

SEQ ID NO: 1707 - RNA, 42 nt, Artificial Sequence; identical to SEQ ID NO: 1605
  Synthetic

SEQ ID NO: 1708 - RNA, 42 nt, Artificial Sequence; identical to SEQ ID NO: 1605
  Synthetic

SEQ ID NO: 1709 - RNA, 42 nt, Artificial Sequence; identical to SEQ ID NO: 1605
  Synthetic

SEQ ID NO: 1710 - RNA, 42 nt, Artificial Sequence; identical to SEQ ID NO: 1605
  Synthetic

SEQ ID NO: 1711 - RNA, 42 nt, Artificial Sequence; identical to SEQ ID NO: 1605
  Synthetic

SEQ ID NO: 1712 - RNA, 42 nt, Artificial Sequence; identical to SEQ ID NO: 1605
  Synthetic

SEQ ID NO: 1713 - RNA, 42 nt, Artificial Sequence; identical to SEQ ID NO: 1605
  Synthetic

SEQ ID NO: 1714 - RNA, 42 nt, Artificial Sequence; identical to SEQ ID NO: 1605
  Synthetic

SEQ ID NO: 1715 - RNA, 42 nt, Artificial Sequence; identical to SEQ ID NO: 1605
  Synthetic

SEQ ID NO: 1716 - RNA, 42 nt, Artificial Sequence; identical to SEQ ID NO: 1605
  Synthetic

SEQ ID NO: 1717 - RNA, 42 nt, Artificial Sequence; identical to SEQ ID NO: 1605
  Synthetic

SEQ ID NO: 1718 - RNA, 42 nt, Artificial Sequence; identical to SEQ ID NO: 1605
  Synthetic

SEQ ID NO: 1719 - RNA, 42 nt, Artificial Sequence; identical to SEQ ID NO: 1605
  Synthetic

SEQ ID NO: 1720 - RNA, 42 nt, Artificial Sequence; identical to SEQ ID NO: 1605
  Synthetic

SEQ ID NO: 1721 - RNA, 42 nt, Artificial Sequence; identical to SEQ ID NO: 1605
  Synthetic

SEQ ID NO: 1722 - RNA, 42 nt, Artificial Sequence; identical to SEQ ID NO: 1605
  Synthetic

SEQ ID NO: 1723 - RNA, 42 nt, Artificial Sequence; identical to SEQ ID NO: 1605
  Synthetic

SEQ ID NO: 1724 - RNA, 42 nt, Artificial Sequence; identical to SEQ ID NO: 1605
  Synthetic

SEQ ID NO: 1725 - RNA, 42 nt, Artificial Sequence; identical to SEQ ID NO: 1605
  Synthetic

SEQ ID NO: 1726 - RNA, 42 nt, Artificial Sequence; identical to SEQ ID NO: 1605
  Synthetic

SEQ ID NO: 1727 - RNA, 42 nt, Artificial Sequence; identical to SEQ ID NO: 1605
  Synthetic

SEQ ID NO: 1728 - RNA, 42 nt, Artificial Sequence; identical to SEQ ID NO: 1605
  Synthetic

SEQ ID NO: 1729 - RNA, 42 nt, Artificial Sequence; identical to SEQ ID NO: 1605
  Synthetic

SEQ ID NO: 1730 - RNA, 42 nt, Artificial Sequence; identical to SEQ ID NO: 1605
  Synthetic

SEQ ID NO: 1731 - RNA, 42 nt, Artificial Sequence; identical to SEQ ID NO: 1605
  Synthetic

SEQ ID NO: 1732 - RNA, 42 nt, Artificial Sequence; identical to SEQ ID NO: 1605
  Synthetic

SEQ ID NO: 1733 - RNA, 42 nt, Artificial Sequence; identical to SEQ ID NO: 1605
  Synthetic

SEQ ID NO: 1734 - RNA, 42 nt, Artificial Sequence; identical to SEQ ID NO: 1605
  Synthetic

SEQ ID NO: 1735 - RNA, 42 nt, Artificial Sequence; identical to SEQ ID NO: 1605
  Synthetic

SEQ ID NO: 1736 - RNA, 42 nt, Artificial Sequence; identical to SEQ ID NO: 1605
  Synthetic

SEQ ID NO: 1737 - RNA, 42 nt, Artificial Sequence; identical to SEQ ID NO: 1605
  Synthetic

SEQ ID NO: 1738 - RNA, 42 nt, Artificial Sequence; identical to SEQ ID NO: 1605
  Synthetic

SEQ ID NO: 1739 - RNA, 42 nt, Artificial Sequence; identical to SEQ ID NO: 1605
  Synthetic

SEQ ID NO: 1740 - RNA, 42 nt, Artificial Sequence; identical to SEQ ID NO: 1605
  Synthetic

SEQ ID NO: 1741 - RNA, 42 nt, Artificial Sequence; identical to SEQ ID NO: 1605
  Synthetic

SEQ ID NO: 1742 - RNA, 42 nt, Artificial Sequence; identical to SEQ ID NO: 1605
  Synthetic

SEQ ID NO: 1743 - RNA, 42 nt, Artificial Sequence; identical to SEQ ID NO: 1605
  Synthetic

SEQ ID NO: 1744 - RNA, 42 nt, Artificial Sequence; identical to SEQ ID NO: 1605
  Synthetic

SEQ ID NO: 1745 - RNA, 42 nt, Artificial Sequence; identical to SEQ ID NO: 1605
  Synthetic

SEQ ID NO: 1746 - RNA, 42 nt, Artificial Sequence; identical to SEQ ID NO: 1605
  Synthetic

SEQ ID NO: 1747 - RNA, 42 nt, Artificial Sequence; identical to SEQ ID NO: 1605
  Synthetic

SEQ ID NO: 1748 - RNA, 42 nt, Artificial Sequence; identical to SEQ ID NO: 1605
  Synthetic

SEQ ID NO: 1749 - RNA, 42 nt, Artificial Sequence; identical to SEQ ID NO: 1605
  Synthetic

SEQ ID NO: 1750 - RNA, 42 nt, Artificial Sequence; identical to SEQ ID NO: 1605
  Synthetic

SEQ ID NO: 1751 - RNA, 42 nt, Artificial Sequence; identical to SEQ ID NO: 1605
  Synthetic

SEQ ID NO: 1752 - RNA, 42 nt, Artificial Sequence; identical to SEQ ID NO: 1605
  Synthetic

SEQ ID NO: 1753 - RNA, 42 nt, Artificial Sequence; identical to SEQ ID NO: 1605
  Synthetic

SEQ ID NO: 1754 - RNA, 42 nt, Artificial Sequence; identical to SEQ ID NO: 1605
  Synthetic

SEQ ID NO: 1755 - RNA, 42 nt, Artificial Sequence; identical to SEQ ID NO: 1605
  Synthetic

SEQ ID NO: 1756 - RNA, 42 nt, Artificial Sequence; identical to SEQ ID NO: 1605
  Synthetic

SEQ ID NO: 1757 - RNA, 42 nt, Artificial Sequence; identical to SEQ ID NO: 1605
  Synthetic

SEQ ID NO: 1758 - RNA, 42 nt, Artificial Sequence; identical to SEQ ID NO: 1605
  Synthetic

SEQ ID NO: 1759 - RNA, 42 nt, Artificial Sequence; identical to SEQ ID NO: 1605
  Synthetic

SEQ ID NO: 1760 - RNA, 42 nt, Artificial Sequence; identical to SEQ ID NO: 1605
  Synthetic

SEQ ID NO: 1761 - RNA, 42 nt, Artificial Sequence; identical to SEQ ID NO: 1605
  Synthetic

SEQ ID NO: 1762 - RNA, 42 nt, Artificial Sequence; identical to SEQ ID NO: 1605
  Synthetic

SEQ ID NO: 1763 - RNA, 42 nt, Artificial Sequence; identical to SEQ ID NO: 1605
  Synthetic

SEQ ID NO: 1764 - RNA, 42 nt, Artificial Sequence; identical to SEQ ID NO: 1605
  Synthetic

SEQ ID NO: 1765 - RNA, 42 nt, Artificial Sequence; identical to SEQ ID NO: 1605
  Synthetic

SEQ ID NO: 1766 - RNA, 42 nt, Artificial Sequence; identical to SEQ ID NO: 1605
  Synthetic

SEQ ID NO: 1767 - RNA, 42 nt, Artificial Sequence; identical to SEQ ID NO: 1605
  Synthetic

SEQ ID NO: 1768 - RNA, 42 nt, Artificial Sequence; identical to SEQ ID NO: 1605
  Synthetic

SEQ ID NO: 1769 - RNA, 42 nt, Artificial Sequence; identical to SEQ ID NO: 1605
  Synthetic

SEQ ID NO: 1770 - RNA, 42 nt, Artificial Sequence; identical to SEQ ID NO: 1605
  Synthetic

SEQ ID NO: 1771 - RNA, 42 nt, Artificial Sequence; identical to SEQ ID NO: 1605
  Synthetic

SEQ ID NO: 1772 - RNA, 42 nt, Artificial Sequence; identical to SEQ ID NO: 1605
  Synthetic

SEQ ID NO: 1773 - RNA, 42 nt, Artificial Sequence; identical to SEQ ID NO: 1605
  Synthetic

SEQ ID NO: 1774 - RNA, 42 nt, Artificial Sequence; identical to SEQ ID NO: 1605
  Synthetic

SEQ ID NO: 1775 - RNA, 42 nt, Artificial Sequence; identical to SEQ ID NO: 1605
  Synthetic

SEQ ID NO: 1776 - RNA, 42 nt, Artificial Sequence; identical to SEQ ID NO: 1605
  Synthetic

SEQ ID NO: 1777 - RNA, 42 nt, Artificial Sequence; identical to SEQ ID NO: 1605
  Synthetic

SEQ ID NO: 1778 - RNA, 42 nt, Artificial Sequence; identical to SEQ ID NO: 1605
  Synthetic

SEQ ID NO: 1779 - RNA, 42 nt, Artificial Sequence; identical to SEQ ID NO: 1605
  Synthetic

SEQ ID NO: 1780 - RNA, 42 nt, Artificial Sequence; identical to SEQ ID NO: 1605
  Synthetic

SEQ ID NO: 1781 - RNA, 42 nt, Artificial Sequence; identical to SEQ ID NO: 1605
  Synthetic

SEQ ID NO: 1782 - RNA, 42 nt, Artificial Sequence; identical to SEQ ID NO: 1605
  Synthetic

SEQ ID NO: 1783 - RNA, 42 nt, Artificial Sequence; identical to SEQ ID NO: 1605
  Synthetic

SEQ ID NO: 1784 - RNA, 42 nt, Artificial Sequence; identical to SEQ ID NO: 1605
  Synthetic

SEQ ID NO: 1785 - RNA, 42 nt, Artificial Sequence; identical to SEQ ID NO: 1605
  Synthetic

SEQ ID NO: 1786 - RNA, 42 nt, Artificial Sequence; identical to SEQ ID NO: 1605
  Synthetic

SEQ ID NO: 1787 - RNA, 42 nt, Artificial Sequence; identical to SEQ ID NO: 1605
  Synthetic

SEQ ID NO: 1788 - RNA, 42 nt, Artificial Sequence; identical to SEQ ID NO: 1605
  Synthetic

SEQ ID NO: 1789 - RNA, 42 nt, Artificial Sequence; identical to SEQ ID NO: 1605
  Synthetic

SEQ ID NO: 1790 - RNA, 42 nt, Artificial Sequence; identical to SEQ ID NO: 1605
  Synthetic

SEQ ID NO: 1791 - RNA, 42 nt, Artificial Sequence; identical to SEQ ID NO: 1605
  Synthetic

SEQ ID NO: 1792 - RNA, 42 nt, Artificial Sequence; identical to SEQ ID NO: 1605
  Synthetic

SEQ ID NO: 1793 - RNA, 42 nt, Artificial Sequence; identical to SEQ ID NO: 1605
  Synthetic

SEQ ID NO: 1794 - RNA, 42 nt, Artificial Sequence; identical to SEQ ID NO: 1605
  Synthetic

SEQ ID NO: 1795 - RNA, 42 nt, Artificial Sequence; identical to SEQ ID NO: 1605
  Synthetic

SEQ ID NO: 1796 - RNA, 42 nt, Artificial Sequence; identical to SEQ ID NO: 1605
  Synthetic

SEQ ID NO: 1797 - RNA, 42 nt, Artificial Sequence; identical to SEQ ID NO: 1605
  Synthetic

SEQ ID NO: 1798 - RNA, 42 nt, Artificial Sequence; identical to SEQ ID NO: 1605
  Synthetic

SEQ ID NO: 1799 - RNA, 42 nt, Artificial Sequence; identical to SEQ ID NO: 1605
  Synthetic

SEQ ID NO: 1800 - RNA, 42 nt, Artificial Sequence; identical to SEQ ID NO: 1605
  Synthetic

SEQ ID NO: 1801 - RNA, 42 nt, Artificial Sequence; identical to SEQ ID NO: 1605
  Synthetic

SEQ ID NO: 1802 - RNA, 42 nt, Artificial Sequence; identical to SEQ ID NO: 1605
  Synthetic

SEQ ID NO: 1803 - RNA, 42 nt, Artificial Sequence; identical to SEQ ID NO: 1605
  Synthetic

SEQ ID NO: 1804 - RNA, 42 nt, Artificial Sequence; identical to SEQ ID NO: 1605
  Synthetic

SEQ ID NO: 1805 - RNA, 42 nt, Artificial Sequence; identical to SEQ ID NO: 1605
  Synthetic

SEQ ID NO: 1806 - RNA, 42 nt, Artificial Sequence; identical to SEQ ID NO: 1605
  Synthetic

SEQ ID NO: 1807 - RNA, 42 nt, Artificial Sequence; identical to SEQ ID NO: 1605
  Synthetic

SEQ ID NO: 1808 - RNA, 42 nt, Artificial Sequence; identical to SEQ ID NO: 1605
  Synthetic

SEQ ID NO: 1809 - RNA, 42 nt, Artificial Sequence; identical to SEQ ID NO: 1605
  Synthetic

SEQ ID NO: 1810 - RNA, 42 nt, Artificial Sequence; identical to SEQ ID NO: 1605
  Synthetic

SEQ ID NO: 1811 - RNA, 42 nt, Artificial Sequence; identical to SEQ ID NO: 1605
  Synthetic

SEQ ID NO: 1812 - RNA, 42 nt, Artificial Sequence; identical to SEQ ID NO: 1605
  Synthetic

SEQ ID NO: 1813 - RNA, 42 nt, Artificial Sequence; identical to SEQ ID NO: 1605
  Synthetic

SEQ ID NO: 1814 - RNA, 42 nt, Artificial Sequence; identical to SEQ ID NO: 1605
  Synthetic

SEQ ID NO: 1815 - RNA, 42 nt, Artificial Sequence; identical to SEQ ID NO: 1605
  Synthetic

SEQ ID NO: 1816 - RNA, 42 nt, Artificial Sequence; identical to SEQ ID NO: 1605
  Synthetic

SEQ ID NO: 1817 - RNA, 42 nt, Artificial Sequence; identical to SEQ ID NO: 1605
  Synthetic

SEQ ID NO: 1818 - RNA, 42 nt, Artificial Sequence; identical to SEQ ID NO: 1605
  Synthetic

SEQ ID NO: 1819 - RNA, 42 nt, Artificial Sequence; identical to SEQ ID NO: 1605
  Synthetic

SEQ ID NO: 1820 - RNA, 42 nt, Artificial Sequence; identical to SEQ ID NO: 1605
  Synthetic

SEQ ID NO: 1821 - RNA, 42 nt, Artificial Sequence; identical to SEQ ID NO: 1605
  Synthetic

SEQ ID NO: 1822 - RNA, 42 nt, Artificial Sequence; identical to SEQ ID NO: 1605
  Synthetic

SEQ ID NO: 1823 - RNA, 42 nt, Artificial Sequence; identical to SEQ ID NO: 1605
  Synthetic

SEQ ID NO: 1824 - RNA, 42 nt, Artificial Sequence; identical to SEQ ID NO: 1605
  Synthetic

SEQ ID NO: 1825 - RNA, 42 nt, Artificial Sequence; identical to SEQ ID NO: 1605
  Synthetic

SEQ ID NO: 1826 - RNA, 42 nt, Artificial Sequence; identical to SEQ ID NO: 1605
  Synthetic

SEQ ID NO: 1827 - RNA, 42 nt, Artificial Sequence; identical to SEQ ID NO: 1605
  Synthetic

SEQ ID NO: 1828 - RNA, 42 nt, Artificial Sequence; identical to SEQ ID NO: 1605
  Synthetic

SEQ ID NO: 1829 - RNA, 42 nt, Artificial Sequence; identical to SEQ ID NO: 1605
  Synthetic

SEQ ID NO: 1830 - RNA, 42 nt, Artificial Sequence; identical to SEQ ID NO: 1605
  Synthetic

SEQ ID NO: 1831 - RNA, 42 nt, Artificial Sequence; identical to SEQ ID NO: 1605
  Synthetic

SEQ ID NO: 1832 - RNA, 42 nt, Artificial Sequence; identical to SEQ ID NO: 1605
  Synthetic

SEQ ID NO: 1833 - RNA, 42 nt, Artificial Sequence; identical to SEQ ID NO: 1605
  Synthetic

SEQ ID NO: 1834 - RNA, 42 nt, Artificial Sequence; identical to SEQ ID NO: 1605
  Synthetic

SEQ ID NO: 1835 - RNA, 42 nt, Artificial Sequence; identical to SEQ ID NO: 1605
  Synthetic

SEQ ID NO: 1836 - RNA, 42 nt, Artificial Sequence; identical to SEQ ID NO: 1605
  Synthetic

SEQ ID NO: 1837 - RNA, 42 nt, Artificial Sequence; identical to SEQ ID NO: 1605
  Synthetic

SEQ ID NO: 1838 - RNA, 42 nt, Artificial Sequence; identical to SEQ ID NO: 1605
  Synthetic

SEQ ID NO: 1839 - RNA, 42 nt, Artificial Sequence; identical to SEQ ID NO: 1605
  Synthetic

SEQ ID NO: 1840 - RNA, 42 nt, Artificial Sequence; identical to SEQ ID NO: 1605
  Synthetic

SEQ ID NO: 1841 - RNA, 42 nt, Artificial Sequence; identical to SEQ ID NO: 1605
  Synthetic

SEQ ID NO: 1842 - RNA, 42 nt, Artificial Sequence; identical to SEQ ID NO: 1605
  Synthetic

SEQ ID NO: 1843 - RNA, 42 nt, Artificial Sequence; identical to SEQ ID NO: 1605
  Synthetic

SEQ ID NO: 1844 - RNA, 42 nt, Artificial Sequence; identical to SEQ ID NO: 1605
  Synthetic

SEQ ID NO: 1845 - RNA, 42 nt, Artificial Sequence; identical to SEQ ID NO: 1605
  Synthetic

SEQ ID NO: 1846 - RNA, 42 nt, Artificial Sequence; identical to SEQ ID NO: 1605
  Synthetic

SEQ ID NO: 1847 - RNA, 42 nt, Artificial Sequence; identical to SEQ ID NO: 1605
  Synthetic

SEQ ID NO: 1848 - RNA, 42 nt, Artificial Sequence; identical to SEQ ID NO: 1605
  Synthetic

SEQ ID NO: 1849 - RNA, 42 nt, Artificial Sequence; identical to SEQ ID NO: 1605
  Synthetic

SEQ ID NO: 1850 - RNA, 42 nt, Artificial Sequence; identical to SEQ ID NO: 1605
  Synthetic

SEQ ID NO: 1851 - RNA, 42 nt, Artificial Sequence; identical to SEQ ID NO: 1605
  Synthetic

SEQ ID NO: 1852 - RNA, 42 nt, Artificial Sequence; identical to SEQ ID NO: 1605
  Synthetic

SEQ ID NO: 1853 - RNA, 42 nt, Artificial Sequence; identical to SEQ ID NO: 1605
  Synthetic

SEQ ID NO: 1854 - RNA, 42 nt, Artificial Sequence; identical to SEQ ID NO: 1605
  Synthetic

SEQ ID NO: 1855 - RNA, 42 nt, Artificial Sequence; identical to SEQ ID NO: 1605
  Synthetic

SEQ ID NO: 1856 - RNA, 42 nt, Artificial Sequence; identical to SEQ ID NO: 1605
  Synthetic

SEQ ID NO: 1857 - RNA, 42 nt, Artificial Sequence; identical to SEQ ID NO: 1605
  Synthetic

SEQ ID NO: 1858 - RNA, 42 nt, Artificial Sequence; identical to SEQ ID NO: 1605
  Synthetic

SEQ ID NO: 1859 - RNA, 42 nt, Artificial Sequence; identical to SEQ ID NO: 1605
  Synthetic

SEQ ID NO: 1860 - RNA, 42 nt, Artificial Sequence; identical to SEQ ID NO: 1605
  Synthetic

SEQ ID NO: 1861 - RNA, 42 nt, Artificial Sequence; identical to SEQ ID NO: 1605
  Synthetic

SEQ ID NO: 1862 - RNA, 42 nt, Artificial Sequence; identical to SEQ ID NO: 1605
  Synthetic

SEQ ID NO: 1863 - RNA, 42 nt, Artificial Sequence; identical to SEQ ID NO: 1605
  Synthetic

SEQ ID NO: 1864 - RNA, 42 nt, Artificial Sequence; identical to SEQ ID NO: 1605
  Synthetic

SEQ ID NO: 1865 - RNA, 42 nt, Artificial Sequence; identical to SEQ ID NO: 1605
  Synthetic

SEQ ID NO: 1866 - RNA, 42 nt, Artificial Sequence; identical to SEQ ID NO: 1605
  Synthetic

SEQ ID NO: 1867 - RNA, 42 nt, Artificial Sequence; identical to SEQ ID NO: 1605
  Synthetic

SEQ ID NO: 1868 - RNA, 42 nt, Artificial Sequence; identical to SEQ ID NO: 1605
  Synthetic

SEQ ID NO: 1869 - RNA, 42 nt, Artificial Sequence; identical to SEQ ID NO: 1605
  Synthetic

SEQ ID NO: 1870 - RNA, 42 nt, Artificial Sequence; identical to SEQ ID NO: 1605
  Synthetic

SEQ ID NO: 1871 - RNA, 42 nt, Artificial Sequence; identical to SEQ ID NO: 1605
  Synthetic

SEQ ID NO: 1872 - RNA, 42 nt, Artificial Sequence; identical to SEQ ID NO: 1605
  Synthetic

SEQ ID NO: 1873 - RNA, 42 nt, Artificial Sequence; identical to SEQ ID NO: 1605
  Synthetic

SEQ ID NO: 1874 - RNA, 42 nt, Artificial Sequence; identical to SEQ ID NO: 1605
  Synthetic

SEQ ID NO: 1875 - RNA, 42 nt, Artificial Sequence; identical to SEQ ID NO: 1605
  Synthetic

SEQ ID NO: 1876 - RNA, 42 nt, Artificial Sequence; identical to SEQ ID NO: 1605
  Synthetic

SEQ ID NO: 1877 - RNA, 42 nt, Artificial Sequence; identical to SEQ ID NO: 1605
  Synthetic

SEQ ID NO: 1878 - RNA, 42 nt, Artificial Sequence; identical to SEQ ID NO: 1605
  Synthetic

SEQ ID NO: 1879 - RNA, 42 nt, Artificial Sequence; identical to SEQ ID NO: 1605
  Synthetic

SEQ ID NO: 1880 - RNA, 42 nt, Artificial Sequence; identical to SEQ ID NO: 1605
  Synthetic

SEQ ID NO: 1881 - RNA, 42 nt, Artificial Sequence; identical to SEQ ID NO: 1605
  Synthetic

SEQ ID NO: 1882 - RNA, 42 nt, Artificial Sequence; identical to SEQ ID NO: 1605
  Synthetic

SEQ ID NO: 1883 - RNA, 42 nt, Artificial Sequence; identical to SEQ ID NO: 1605
  Synthetic

SEQ ID NO: 1884 - RNA, 42 nt, Artificial Sequence; identical to SEQ ID NO: 1605
  Synthetic

SEQ ID NO: 1885 - RNA, 42 nt, Artificial Sequence; identical to SEQ ID NO: 1605
  Synthetic

SEQ ID NO: 1886 - RNA, 42 nt, Artificial Sequence; identical to SEQ ID NO: 1605
  Synthetic

SEQ ID NO: 1887 - RNA, 42 nt, Artificial Sequence; identical to SEQ ID NO: 1605
  Synthetic

SEQ ID NO: 1888 - RNA, 42 nt, Artificial Sequence
  Synthetic
aaauagacaccaaaucuuacguuuuagagcuaugcuguuuug

SEQ ID NO: 1889 - RNA, 42 nt, Artificial Sequence; identical to SEQ ID NO: 1888
  Synthetic

SEQ ID NO: 1890 - RNA, 42 nt, Artificial Sequence; identical to SEQ ID NO: 1888
  Synthetic

SEQ ID NO: 1891 - RNA, 42 nt, Artificial Sequence; identical to SEQ ID NO: 1888
  Synthetic

SEQ ID NO: 1892 - RNA, 42 nt, Artificial Sequence; identical to SEQ ID NO: 1888
  Synthetic

SEQ ID NO: 1893 - RNA, 42 nt, Artificial Sequence; identical to SEQ ID NO: 1888
  Synthetic

SEQ ID NO: 1894 - RNA, 42 nt, Artificial Sequence; identical to SEQ ID NO: 1888
  Synthetic

SEQ ID NO: 1895 - RNA, 42 nt, Artificial Sequence; identical to SEQ ID NO: 1888
  Synthetic

SEQ ID NO: 1896 - RNA, 42 nt, Artificial Sequence; identical to SEQ ID NO: 1888
  Synthetic

SEQ ID NO: 1897 - RNA, 42 nt, Artificial Sequence; identical to SEQ ID NO: 1888
  Synthetic

SEQ ID NO: 1898 - RNA, 42 nt, Artificial Sequence; identical to SEQ ID NO: 1888
  Synthetic

SEQ ID NO: 1899 - RNA, 42 nt, Artificial Sequence; identical to SEQ ID NO: 1888
  Synthetic

SEQ ID NO: 1900 - RNA, 42 nt, Artificial Sequence; identical to SEQ ID NO: 1888
  Synthetic

SEQ ID NO: 1901 - RNA, 42 nt, Artificial Sequence; identical to SEQ ID NO: 1888
  Synthetic

SEQ ID NO: 1902 - RNA, 42 nt, Artificial Sequence; identical to SEQ ID NO: 1888
  Synthetic

SEQ ID NO: 1903 - RNA, 42 nt, Artificial Sequence; identical to SEQ ID NO: 1888
  Synthetic

SEQ ID NO: 1904 - RNA, 42 nt, Artificial Sequence; identical to SEQ ID NO: 1888
  Synthetic

SEQ ID NO: 1905 - RNA, 42 nt, Artificial Sequence; identical to SEQ ID NO: 1888
  Synthetic

SEQ ID NO: 1906 - RNA, 42 nt, Artificial Sequence; identical to SEQ ID NO: 1888
  Synthetic

SEQ ID NO: 1907 - RNA, 42 nt, Artificial Sequence; identical to SEQ ID NO: 1888
  Synthetic

SEQ ID NO: 1908 - RNA, 42 nt, Artificial Sequence; identical to SEQ ID NO: 1888
  Synthetic

SEQ ID NO: 1909 - RNA, 42 nt, Artificial Sequence; identical to SEQ ID NO: 1888
  Synthetic

SEQ ID NO: 1910 - RNA, 42 nt, Artificial Sequence; identical to SEQ ID NO: 1888
  Synthetic

SEQ ID NO: 1911 - RNA, 42 nt, Artificial Sequence; identical to SEQ ID NO: 1888
  Synthetic

SEQ ID NO: 1912 - RNA, 42 nt, Artificial Sequence; identical to SEQ ID NO: 1888
  Synthetic

SEQ ID NO: 1913 - RNA, 42 nt, Artificial Sequence; identical to SEQ ID NO: 1888
  Synthetic

SEQ ID NO: 1914 - RNA, 42 nt, Artificial Sequence; identical to SEQ ID NO: 1888
  Synthetic

SEQ ID NO: 1915 - RNA, 42 nt, Artificial Sequence; identical to SEQ ID NO: 1888
  Synthetic

SEQ ID NO: 1916 - RNA, 42 nt, Artificial Sequence; identical to SEQ ID NO: 1888
  Synthetic

SEQ ID NO: 1917 - RNA, 42 nt, Artificial Sequence; identical to SEQ ID NO: 1888
  Synthetic

SEQ ID NO: 1918 - RNA, 42 nt, Artificial Sequence; identical to SEQ ID NO: 1888
  Synthetic

SEQ ID NO: 1919 - RNA, 42 nt, Artificial Sequence; identical to SEQ ID NO: 1888
  Synthetic

SEQ ID NO: 1920 - RNA, 42 nt, Artificial Sequence; identical to SEQ ID NO: 1888
  Synthetic

SEQ ID NO: 1921 - RNA, 42 nt, Artificial Sequence; identical to SEQ ID NO: 1888
  Synthetic

SEQ ID NO: 1922 - RNA, 42 nt, Artificial Sequence; identical to SEQ ID NO: 1888
  Synthetic

SEQ ID NO: 1923 - RNA, 42 nt, Artificial Sequence; identical to SEQ ID NO: 1888
  Synthetic

SEQ ID NO: 1924 - RNA, 42 nt, Artificial Sequence; identical to SEQ ID NO: 1888
  Synthetic

SEQ ID NO: 1925 - RNA, 42 nt, Artificial Sequence; identical to SEQ ID NO: 1888
  Synthetic

SEQ ID NO: 1926 - RNA, 42 nt, Artificial Sequence; identical to SEQ ID NO: 1888
  Synthetic

SEQ ID NO: 1927 - RNA, 42 nt, Artificial Sequence; identical to SEQ ID NO: 1888
  Synthetic

SEQ ID NO: 1928 - RNA, 42 nt, Artificial Sequence; identical to SEQ ID NO: 1888
  Synthetic

SEQ ID NO: 1929 - RNA, 42 nt, Artificial Sequence; identical to SEQ ID NO: 1888
  Synthetic

SEQ ID NO: 1930 - RNA, 42 nt, Artificial Sequence; identical to SEQ ID NO: 1888
  Synthetic

SEQ ID NO: 1931 - RNA, 42 nt, Artificial Sequence; identical to SEQ ID NO: 1888
  Synthetic

SEQ ID NO: 1932 - RNA, 42 nt, Artificial Sequence; identical to SEQ ID NO: 1888
  Synthetic

SEQ ID NO: 1933 - RNA, 42 nt, Artificial Sequence; identical to SEQ ID NO: 1888
  Synthetic

SEQ ID NO: 1934 - RNA, 42 nt, Artificial Sequence; identical to SEQ ID NO: 1888
  Synthetic

SEQ ID NO: 1935 - RNA, 42 nt, Artificial Sequence; identical to SEQ ID NO: 1888
  Synthetic

SEQ ID NO: 1936 - RNA, 42 nt, Artificial Sequence; identical to SEQ ID NO: 1888
  Synthetic

SEQ ID NO: 1937 - RNA, 42 nt, Artificial Sequence; identical to SEQ ID NO: 1888
  Synthetic

SEQ ID NO: 1938 - RNA, 42 nt, Artificial Sequence; identical to SEQ ID NO: 1888
  Synthetic

SEQ ID NO: 1939 - RNA, 42 nt, Artificial Sequence; identical to SEQ ID NO: 1888
  Synthetic

SEQ ID NO: 1940 - RNA, 42 nt, Artificial Sequence; identical to SEQ ID NO: 1888
  Synthetic

SEQ ID NO: 1941 - RNA, 42 nt, Artificial Sequence; identical to SEQ ID NO: 1888
  Synthetic

SEQ ID NO: 1942 - RNA, 42 nt, Artificial Sequence; identical to SEQ ID NO: 1888
  Synthetic

SEQ ID NO: 1943 - RNA, 42 nt, Artificial Sequence; identical to SEQ ID NO: 1888
  Synthetic

SEQ ID NO: 1944 - RNA, 42 nt, Artificial Sequence; identical to SEQ ID NO: 1888
  Synthetic

SEQ ID NO: 1945 - RNA, 42 nt, Artificial Sequence; identical to SEQ ID NO: 1888
  Synthetic

SEQ ID NO: 1946 - RNA, 42 nt, Artificial Sequence; identical to SEQ ID NO: 1888
  Synthetic

SEQ ID NO: 1947 - RNA, 42 nt, Artificial Sequence; identical to SEQ ID NO: 1888
  Synthetic

SEQ ID NO: 1948 - RNA, 42 nt, Artificial Sequence; identical to SEQ ID NO: 1888
  Synthetic

SEQ ID NO: 1949 - RNA, 42 nt, Artificial Sequence; identical to SEQ ID NO: 1888
  Synthetic

SEQ ID NO: 1950 - RNA, 42 nt, Artificial Sequence; identical to SEQ ID NO: 1888
  Synthetic

SEQ ID NO: 1951 - RNA, 42 nt, Artificial Sequence; identical to SEQ ID NO: 1888
  Synthetic

SEQ ID NO: 1952 - RNA, 42 nt, Artificial Sequence; identical to SEQ ID NO: 1888
  Synthetic

SEQ ID NO: 1953 - RNA, 42 nt, Artificial Sequence; identical to SEQ ID NO: 1888
  Synthetic

SEQ ID NO: 1954 - RNA, 42 nt, Artificial Sequence; identical to SEQ ID NO: 1888
  Synthetic

SEQ ID NO: 1955 - RNA, 42 nt, Artificial Sequence; identical to SEQ ID NO: 1888
  Synthetic

SEQ ID NO: 1956 - RNA, 42 nt, Artificial Sequence; identical to SEQ ID NO: 1888
  Synthetic

SEQ ID NO: 1957 - RNA, 42 nt, Artificial Sequence; identical to SEQ ID NO: 1888
  Synthetic

SEQ ID NO: 1958 - RNA, 42 nt, Artificial Sequence; identical to SEQ ID NO: 1888
  Synthetic

SEQ ID NO: 1959 - RNA, 42 nt, Artificial Sequence; identical to SEQ ID NO: 1888
  Synthetic

SEQ ID NO: 1960 - RNA, 42 nt, Artificial Sequence; identical to SEQ ID NO: 1888
  Synthetic

SEQ ID NO: 1961 - RNA, 42 nt, Artificial Sequence; identical to SEQ ID NO: 1888
  Synthetic

SEQ ID NO: 1962 - RNA, 42 nt, Artificial Sequence; identical to SEQ ID NO: 1888
  Synthetic

SEQ ID NO: 1963 - RNA, 42 nt, Artificial Sequence; identical to SEQ ID NO: 1888
  Synthetic

SEQ ID NO: 1964 - RNA, 42 nt, Artificial Sequence; identical to SEQ ID NO: 1888
  Synthetic

SEQ ID NO: 1965 - RNA, 42 nt, Artificial Sequence; identical to SEQ ID NO: 1888
  Synthetic

SEQ ID NO: 1966 - RNA, 42 nt, Artificial Sequence; identical to SEQ ID NO: 1888
  Synthetic

SEQ ID NO: 1967 - RNA, 42 nt, Artificial Sequence; identical to SEQ ID NO: 1888
  Synthetic

SEQ ID NO: 1968 - RNA, 42 nt, Artificial Sequence; identical to SEQ ID NO: 1888
  Synthetic

SEQ ID NO: 1969 - RNA, 42 nt, Artificial Sequence; identical to SEQ ID NO: 1888
  Synthetic

SEQ ID NO: 1970 - RNA, 42 nt, Artificial Sequence; identical to SEQ ID NO: 1888
  Synthetic

SEQ ID NO: 1971 - RNA, 42 nt, Artificial Sequence; identical to SEQ ID NO: 1888
  Synthetic

SEQ ID NO: 1972 - RNA, 42 nt, Artificial Sequence; identical to SEQ ID NO: 1888
  Synthetic

SEQ ID NO: 1973 - RNA, 42 nt, Artificial Sequence; identical to SEQ ID NO: 1888
  Synthetic

SEQ ID NO: 1974 - RNA, 42 nt, Artificial Sequence; identical to SEQ ID NO: 1888
  Synthetic

SEQ ID NO: 1975 - RNA, 42 nt, Artificial Sequence; identical to SEQ ID NO: 1888
  Synthetic

SEQ ID NO: 1976 - RNA, 42 nt, Artificial Sequence; identical to SEQ ID NO: 1888
  Synthetic

SEQ ID NO: 1977 - RNA, 42 nt, Artificial Sequence; identical to SEQ ID NO: 1888
  Synthetic

SEQ ID NO: 1978 - RNA, 42 nt, Artificial Sequence; identical to SEQ ID NO: 1888
  Synthetic

SEQ ID NO: 1979 - RNA, 42 nt, Artificial Sequence; identical to SEQ ID NO: 1888
  Synthetic

SEQ ID NO: 1980 - RNA, 42 nt, Artificial Sequence; identical to SEQ ID NO: 1888
  Synthetic

SEQ ID NO: 1981 - RNA, 42 nt, Artificial Sequence; identical to SEQ ID NO: 1888
  Synthetic

SEQ ID NO: 1982 - RNA, 42 nt, Artificial Sequence; identical to SEQ ID NO: 1888
  Synthetic

SEQ ID NO: 1983 - RNA, 42 nt, Artificial Sequence; identical to SEQ ID NO: 1888
  Synthetic

SEQ ID NO: 1984 - RNA, 42 nt, Artificial Sequence; identical to SEQ ID NO: 1888
  Synthetic

SEQ ID NO: 1985 - RNA, 42 nt, Artificial Sequence; identical to SEQ ID NO: 1888
  Synthetic

SEQ ID NO: 1986 - RNA, 42 nt, Artificial Sequence; identical to SEQ ID NO: 1888
  Synthetic

SEQ ID NO: 1987 - RNA, 42 nt, Artificial Sequence; identical to SEQ ID NO: 1888
  Synthetic

SEQ ID NO: 1988 - RNA, 42 nt, Artificial Sequence; identical to SEQ ID NO: 1888
  Synthetic

SEQ ID NO: 1989 - RNA, 42 nt, Artificial Sequence; identical to SEQ ID NO: 1888
  Synthetic

SEQ ID NO: 1990 - RNA, 42 nt, Artificial Sequence; identical to SEQ ID NO: 1888
  Synthetic

SEQ ID NO: 1991 - RNA, 42 nt, Artificial Sequence; identical to SEQ ID NO: 1888
  Synthetic

SEQ ID NO: 1992 - RNA, 42 nt, Artificial Sequence; identical to SEQ ID NO: 1888
  Synthetic

SEQ ID NO: 1993 - RNA, 42 nt, Artificial Sequence; identical to SEQ ID NO: 1888
  Synthetic

SEQ ID NO: 1994 - RNA, 42 nt, Artificial Sequence; identical to SEQ ID NO: 1888
  Synthetic

SEQ ID NO: 1995 - RNA, 42 nt, Artificial Sequence; identical to SEQ ID NO: 1888
  Synthetic

SEQ ID NO: 1996 - RNA, 42 nt, Artificial Sequence; identical to SEQ ID NO: 1888
  Synthetic

SEQ ID NO: 1997 - RNA, 42 nt, Artificial Sequence; identical to SEQ ID NO: 1888
  Synthetic

SEQ ID NO: 1998 - RNA, 42 nt, Artificial Sequence; identical to SEQ ID NO: 1888
  Synthetic

SEQ ID NO: 1999 - RNA, 42 nt, Artificial Sequence; identical to SEQ ID NO: 1888
  Synthetic

SEQ ID NO: 2000 - RNA, 42 nt, Artificial Sequence; identical to SEQ ID NO: 1888
  Synthetic

SEQ ID NO: 2001 - RNA, 42 nt, Artificial Sequence; identical to SEQ ID NO: 1888
  Synthetic

SEQ ID NO: 2002 - RNA, 42 nt, Artificial Sequence; identical to SEQ ID NO: 1888
  Synthetic

SEQ ID NO: 2003 - RNA, 42 nt, Artificial Sequence; identical to SEQ ID NO: 1888
  Synthetic

SEQ ID NO: 2004 - RNA, 42 nt, Artificial Sequence; identical to SEQ ID NO: 1888
  Synthetic

SEQ ID NO: 2005 - RNA, 42 nt, Artificial Sequence; identical to SEQ ID NO: 1888
  Synthetic

SEQ ID NO: 2006 - RNA, 42 nt, Artificial Sequence; identical to SEQ ID NO: 1888
  Synthetic

SEQ ID NO: 2007 - RNA, 42 nt, Artificial Sequence; identical to SEQ ID NO: 1888
  Synthetic

SEQ ID NO: 2008 - RNA, 42 nt, Artificial Sequence; identical to SEQ ID NO: 1888
  Synthetic

SEQ ID NO: 2009 - RNA, 42 nt, Artificial Sequence; identical to SEQ ID NO: 1888
  Synthetic

SEQ ID NO: 2010 - RNA, 42 nt, Artificial Sequence; identical to SEQ ID NO: 1888
  Synthetic

SEQ ID NO: 2011 - RNA, 42 nt, Artificial Sequence; identical to SEQ ID NO: 1888
  Synthetic

SEQ ID NO: 2012 - RNA, 42 nt, Artificial Sequence; identical to SEQ ID NO: 1888
  Synthetic

SEQ ID NO: 2013 - RNA, 42 nt, Artificial Sequence; identical to SEQ ID NO: 1888
  Synthetic

SEQ ID NO: 2014 - RNA, 42 nt, Artificial Sequence; identical to SEQ ID NO: 1888
  Synthetic

SEQ ID NO: 2015 - RNA, 42 nt, Artificial Sequence; identical to SEQ ID NO: 1888
  Synthetic

SEQ ID NO: 2016 - RNA, 42 nt, Artificial Sequence; identical to SEQ ID NO: 1888
  Synthetic

SEQ ID NO: 2017 - RNA, 42 nt, Artificial Sequence; identical to SEQ ID NO: 1888
  Synthetic

SEQ ID NO: 2018 - RNA, 42 nt, Artificial Sequence; identical to SEQ ID NO: 1888
  Synthetic

SEQ ID NO: 2019 - RNA, 42 nt, Artificial Sequence; identical to SEQ ID NO: 1888
  Synthetic

SEQ ID NO: 2020 - RNA, 42 nt, Artificial Sequence; identical to SEQ ID NO: 1888
  Synthetic

SEQ ID NO: 2021 - RNA, 42 nt, Artificial Sequence; identical to SEQ ID NO: 1888
  Synthetic

SEQ ID NO: 2022 - RNA, 42 nt, Artificial Sequence; identical to SEQ ID NO: 1888
  Synthetic

SEQ ID NO: 2023 - RNA, 42 nt, Artificial Sequence; identical to SEQ ID NO: 1888
  Synthetic

SEQ ID NO: 2024 - RNA, 42 nt, Artificial Sequence; identical to SEQ ID NO: 1888
  Synthetic

SEQ ID NO: 2025 - RNA, 42 nt, Artificial Sequence; identical to SEQ ID NO: 1888
  Synthetic

SEQ ID NO: 2026 - RNA, 42 nt, Artificial Sequence; identical to SEQ ID NO: 1888
  Synthetic

SEQ ID NO: 2027 - RNA, 42 nt, Artificial Sequence; identical to SEQ ID NO: 1888
  Synthetic

SEQ ID NO: 2028 - RNA, 42 nt, Artificial Sequence; identical to SEQ ID NO: 1888
  Synthetic

SEQ ID NO: 2029 - RNA, 42 nt, Artificial Sequence; identical to SEQ ID NO: 1888
  Synthetic

SEQ ID NO: 2030 - RNA, 42 nt, Artificial Sequence; identical to SEQ ID NO: 1888
  Synthetic

SEQ ID NO: 2031 - RNA, 42 nt, Artificial Sequence; identical to SEQ ID NO: 1888
  Synthetic

SEQ ID NO: 2032 - RNA, 42 nt, Artificial Sequence; identical to SEQ ID NO: 1888
  Synthetic

SEQ ID NO: 2033 - RNA, 42 nt, Artificial Sequence; identical to SEQ ID NO: 1888
  Synthetic

SEQ ID NO: 2034 - RNA, 42 nt, Artificial Sequence; identical to SEQ ID NO: 1888
  Synthetic

SEQ ID NO: 2035 - RNA, 42 nt, Artificial Sequence; identical to SEQ ID NO: 1888
  Synthetic

SEQ ID NO: 2036 - RNA, 42 nt, Artificial Sequence; identical to SEQ ID NO: 1888
  Synthetic

SEQ ID NO: 2037 - RNA, 42 nt, Artificial Sequence; identical to SEQ ID NO: 1888
  Synthetic

SEQ ID NO: 2038 - RNA, 42 nt, Artificial Sequence; identical to SEQ ID NO: 1888
  Synthetic

SEQ ID NO: 2039 - RNA, 42 nt, Artificial Sequence; identical to SEQ ID NO: 1888
  Synthetic

SEQ ID NO: 2040 - RNA, 42 nt, Artificial Sequence; identical to SEQ ID NO: 1888
  Synthetic

SEQ ID NO: 2041 - RNA, 42 nt, Artificial Sequence; identical to SEQ ID NO: 1888
  Synthetic

SEQ ID NO: 2042 - RNA, 42 nt, Artificial Sequence; identical to SEQ ID NO: 1888
  Synthetic

SEQ ID NO: 2043 - RNA, 42 nt, Artificial Sequence; identical to SEQ ID NO: 1888
  Synthetic

SEQ ID NO: 2044 - RNA, 42 nt, Artificial Sequence; identical to SEQ ID NO: 1888
  Synthetic

SEQ ID NO: 2045 - RNA, 42 nt, Artificial Sequence; identical to SEQ ID NO: 1888
  Synthetic

SEQ ID NO: 2046 - RNA, 42 nt, Artificial Sequence; identical to SEQ ID NO: 1888
  Synthetic

SEQ ID NO: 2047 - RNA, 42 nt, Artificial Sequence; identical to SEQ ID NO: 1888
  Synthetic

SEQ ID NO: 2048 - RNA, 42 nt, Artificial Sequence; identical to SEQ ID NO: 1888
  Synthetic

SEQ ID NO: 2049 - RNA, 42 nt, Artificial Sequence; identical to SEQ ID NO: 1888
  Synthetic

SEQ ID NO: 2050 - RNA, 42 nt, Artificial Sequence; identical to SEQ ID NO: 1888
  Synthetic

SEQ ID NO: 2051 - RNA, 42 nt, Artificial Sequence; identical to SEQ ID NO: 1888
  Synthetic

SEQ ID NO: 2052 - RNA, 42 nt, Artificial Sequence; identical to SEQ ID NO: 1888
  Synthetic

SEQ ID NO: 2053 - RNA, 42 nt, Artificial Sequence; identical to SEQ ID NO: 1888
  Synthetic

SEQ ID NO: 2054 - RNA, 42 nt, Artificial Sequence; identical to SEQ ID NO: 1888
  Synthetic

SEQ ID NO: 2055 - RNA, 42 nt, Artificial Sequence; identical to SEQ ID NO: 1888
  Synthetic

SEQ ID NO: 2056 - RNA, 42 nt, Artificial Sequence; identical to SEQ ID NO: 1888
  Synthetic

SEQ ID NO: 2057 - RNA, 42 nt, Artificial Sequence; identical to SEQ ID NO: 1888
  Synthetic

SEQ ID NO: 2058 - RNA, 42 nt, Artificial Sequence; identical to SEQ ID NO: 1888
  Synthetic

SEQ ID NO: 2059 - RNA, 42 nt, Artificial Sequence; identical to SEQ ID NO: 1888
  Synthetic

SEQ ID NO: 2060 - RNA, 42 nt, Artificial Sequence; identical to SEQ ID NO: 1888
  Synthetic

SEQ ID NO: 2061 - RNA, 42 nt, Artificial Sequence; identical to SEQ ID NO: 1888
  Synthetic

SEQ ID NO: 2062 - RNA, 42 nt, Artificial Sequence; identical to SEQ ID NO: 1888
  Synthetic

SEQ ID NO: 2063 - RNA, 42 nt, Artificial Sequence; identical to SEQ ID NO: 1888
  Synthetic

SEQ ID NO: 2064 - RNA, 42 nt, Artificial Sequence; identical to SEQ ID NO: 1888
  Synthetic

SEQ ID NO: 2065 - RNA, 42 nt, Artificial Sequence; identical to SEQ ID NO: 1888
  Synthetic

SEQ ID NO: 2066 - RNA, 42 nt, Artificial Sequence; identical to SEQ ID NO: 1888
  Synthetic

SEQ ID NO: 2067 - RNA, 42 nt, Artificial Sequence; identical to SEQ ID NO: 1888
  Synthetic

SEQ ID NO: 2068 - RNA, 42 nt, Artificial Sequence; identical to SEQ ID NO: 1888
  Synthetic

SEQ ID NO: 2069 - RNA, 42 nt, Artificial Sequence; identical to SEQ ID NO: 1888
  Synthetic

SEQ ID NO: 2070 - RNA, 42 nt, Artificial Sequence; identical to SEQ ID NO: 1888
  Synthetic

SEQ ID NO: 2071 - RNA, 42 nt, Artificial Sequence; identical to SEQ ID NO: 1888
  Synthetic

SEQ ID NO: 2072 - RNA, 42 nt, Artificial Sequence; identical to SEQ ID NO: 1888
  Synthetic

SEQ ID NO: 2073 - RNA, 42 nt, Artificial Sequence; identical to SEQ ID NO: 1888
  Synthetic

SEQ ID NO: 2074 - RNA, 42 nt, Artificial Sequence; identical to SEQ ID NO: 1888
  Synthetic

SEQ ID NO: 2075 - RNA, 42 nt, Artificial Sequence; identical to SEQ ID NO: 1888
  Synthetic

SEQ ID NO: 2076 - RNA, 42 nt, Artificial Sequence; identical to SEQ ID NO: 1888
  Synthetic

SEQ ID NO: 2077 - RNA, 42 nt, Artificial Sequence; identical to SEQ ID NO: 1888
  Synthetic

SEQ ID NO: 2078 - RNA, 42 nt, Artificial Sequence; identical to SEQ ID NO: 1888
  Synthetic

SEQ ID NO: 2079 - RNA, 42 nt, Artificial Sequence; identical to SEQ ID NO: 1888
  Synthetic

SEQ ID NO: 2080 - RNA, 42 nt, Artificial Sequence; identical to SEQ ID NO: 1888
  Synthetic

SEQ ID NO: 2081 - RNA, 42 nt, Artificial Sequence; identical to SEQ ID NO: 1888
  Synthetic

SEQ ID NO: 2082 - RNA, 42 nt, Artificial Sequence; identical to SEQ ID NO: 1888
  Synthetic

SEQ ID NO: 2083 - RNA, 42 nt, Artificial Sequence; identical to SEQ ID NO: 1888
  Synthetic

SEQ ID NO: 2084 - RNA, 42 nt, Artificial Sequence; identical to SEQ ID NO: 1888
  Synthetic

SEQ ID NO: 2085 - RNA, 42 nt, Artificial Sequence; identical to SEQ ID NO: 1888
  Synthetic

SEQ ID NO: 2086 - RNA, 42 nt, Artificial Sequence; identical to SEQ ID NO: 1888
  Synthetic

SEQ ID NO: 2087 - RNA, 42 nt, Artificial Sequence; identical to SEQ ID NO: 1888
  Synthetic

SEQ ID NO: 2088 - RNA, 42 nt, Artificial Sequence; identical to SEQ ID NO: 1888
  Synthetic

SEQ ID NO: 2089 - RNA, 42 nt, Artificial Sequence; identical to SEQ ID NO: 1888
  Synthetic

SEQ ID NO: 2090 - RNA, 42 nt, Artificial Sequence; identical to SEQ ID NO: 1888
  Synthetic

SEQ ID NO: 2091 - RNA, 42 nt, Artificial Sequence; identical to SEQ ID NO: 1888
  Synthetic

SEQ ID NO: 2092 - RNA, 42 nt, Artificial Sequence; identical to SEQ ID NO: 1888
  Synthetic

SEQ ID NO: 2093 - RNA, 42 nt, Artificial Sequence; identical to SEQ ID NO: 1888
  Synthetic

SEQ ID NO: 2094 - RNA, 42 nt, Artificial Sequence; identical to SEQ ID NO: 1888
  Synthetic

SEQ ID NO: 2095 - RNA, 42 nt, Artificial Sequence; identical to SEQ ID NO: 1888
  Synthetic

SEQ ID NO: 2096 - RNA, 42 nt, Artificial Sequence; identical to SEQ ID NO: 1888
  Synthetic

SEQ ID NO: 2097 - RNA, 42 nt, Artificial Sequence; identical to SEQ ID NO: 1888
  Synthetic

SEQ ID NO: 2098 - RNA, 42 nt, Artificial Sequence; identical to SEQ ID NO: 1888
  Synthetic

SEQ ID NO: 2099 - RNA, 42 nt, Artificial Sequence; identical to SEQ ID NO: 1888
  Synthetic

SEQ ID NO: 2100 - RNA, 42 nt, Artificial Sequence; identical to SEQ ID NO: 1888
  Synthetic

SEQ ID NO: 2101 - RNA, 42 nt, Artificial Sequence; identical to SEQ ID NO: 1888
  Synthetic

SEQ ID NO: 2102 - RNA, 42 nt, Artificial Sequence; identical to SEQ ID NO: 1888
  Synthetic

SEQ ID NO: 2103 - RNA, 42 nt, Artificial Sequence; identical to SEQ ID NO: 1888
  Synthetic

SEQ ID NO: 2104 - RNA, 42 nt, Artificial Sequence; identical to SEQ ID NO: 1888
  Synthetic

SEQ ID NO: 2105 - RNA, 42 nt, Artificial Sequence; identical to SEQ ID NO: 1888
  Synthetic

SEQ ID NO: 2106 - RNA, 42 nt, Artificial Sequence; identical to SEQ ID NO: 1888
  Synthetic

SEQ ID NO: 2107 - RNA, 42 nt, Artificial Sequence; identical to SEQ ID NO: 1888
  Synthetic

SEQ ID NO: 2108 - RNA, 42 nt, Artificial Sequence; identical to SEQ ID NO: 1888
  Synthetic

SEQ ID NO: 2109 - RNA, 42 nt, Artificial Sequence; identical to SEQ ID NO: 1888
  Synthetic

SEQ ID NO: 2110 - RNA, 42 nt, Artificial Sequence; identical to SEQ ID NO: 1888
  Synthetic

SEQ ID NO: 2111 - RNA, 42 nt, Artificial Sequence; identical to SEQ ID NO: 1888
  Synthetic

SEQ ID NO: 2112 - RNA, 42 nt, Artificial Sequence; identical to SEQ ID NO: 1888
  Synthetic

SEQ ID NO: 2113 - RNA, 42 nt, Artificial Sequence; identical to SEQ ID NO: 1888
  Synthetic

SEQ ID NO: 2114 - RNA, 42 nt, Artificial Sequence; identical to SEQ ID NO: 1888
  Synthetic

SEQ ID NO: 2115 - RNA, 42 nt, Artificial Sequence; identical to SEQ ID NO: 1888
  Synthetic

SEQ ID NO: 2116 - RNA, 42 nt, Artificial Sequence; identical to SEQ ID NO: 1888
  Synthetic

SEQ ID NO: 2117 - RNA, 42 nt, Artificial Sequence; identical to SEQ ID NO: 1888
  Synthetic

SEQ ID NO: 2118 - RNA, 42 nt, Artificial Sequence; identical to SEQ ID NO: 1888
  Synthetic

SEQ ID NO: 2119 - RNA, 42 nt, Artificial Sequence; identical to SEQ ID NO: 1888
  Synthetic

SEQ ID NO: 2120 - RNA, 42 nt, Artificial Sequence; identical to SEQ ID NO: 1888
  Synthetic

SEQ ID NO: 2121 - RNA, 42 nt, Artificial Sequence; identical to SEQ ID NO: 1888
  Synthetic

SEQ ID NO: 2122 - RNA, 42 nt, Artificial Sequence; identical to SEQ ID NO: 1888
  Synthetic

SEQ ID NO: 2123 - RNA, 42 nt, Artificial Sequence; identical to SEQ ID NO: 1888
  Synthetic

SEQ ID NO: 2124 - RNA, 42 nt, Artificial Sequence; identical to SEQ ID NO: 1888
  Synthetic

SEQ ID NO: 2125 - RNA, 42 nt, Artificial Sequence; identical to SEQ ID NO: 1888
  Synthetic

SEQ ID NO: 2126 - RNA, 42 nt, Artificial Sequence; identical to SEQ ID NO: 1888
  Synthetic

SEQ ID NO: 2127 - RNA, 42 nt, Artificial Sequence; identical to SEQ ID NO: 1888
  Synthetic

SEQ ID NO: 2128 - RNA, 42 nt, Artificial Sequence; identical to SEQ ID NO: 1888
  Synthetic

SEQ ID NO: 2129 - RNA, 42 nt, Artificial Sequence; identical to SEQ ID NO: 1888
  Synthetic

SEQ ID NO: 2130 - RNA, 42 nt, Artificial Sequence; identical to SEQ ID NO: 1888
  Synthetic

SEQ ID NO: 2131 - RNA, 42 nt, Artificial Sequence; identical to SEQ ID NO: 1888
  Synthetic

SEQ ID NO: 2132 - RNA, 42 nt, Artificial Sequence; identical to SEQ ID NO: 1888
  Synthetic

SEQ ID NO: 2133 - RNA, 42 nt, Artificial Sequence; identical to SEQ ID NO: 1888
  Synthetic

SEQ ID NO: 2134 - RNA, 42 nt, Artificial Sequence; identical to SEQ ID NO: 1888
  Synthetic

SEQ ID NO: 2135 - RNA, 42 nt, Artificial Sequence; identical to SEQ ID NO: 1888
  Synthetic

SEQ ID NO: 2136 - RNA, 42 nt, Artificial Sequence; identical to SEQ ID NO: 1888
  Synthetic

SEQ ID NO: 2137 - RNA, 42 nt, Artificial Sequence; identical to SEQ ID NO: 1888
  Synthetic

SEQ ID NO: 2138 - RNA, 42 nt, Artificial Sequence; identical to SEQ ID NO: 1888
  Synthetic

SEQ ID NO: 2139 - RNA, 42 nt, Artificial Sequence; identical to SEQ ID NO: 1888
  Synthetic

SEQ ID NO: 2140 - RNA, 42 nt, Artificial Sequence; identical to SEQ ID NO: 1888
  Synthetic

SEQ ID NO: 2141 - RNA, 42 nt, Artificial Sequence; identical to SEQ ID NO: 1888
  Synthetic

SEQ ID NO: 2142 - RNA, 42 nt, Artificial Sequence; identical to SEQ ID NO: 1888
  Synthetic

SEQ ID NO: 2143 - RNA, 42 nt, Artificial Sequence; identical to SEQ ID NO: 1888
  Synthetic

SEQ ID NO: 2144 - RNA, 42 nt, Artificial Sequence; identical to SEQ ID NO: 1888
  Synthetic

SEQ ID NO: 2145 - RNA, 42 nt, Artificial Sequence; identical to SEQ ID NO: 1888
  Synthetic

SEQ ID NO: 2146 - RNA, 42 nt, Artificial Sequence; identical to SEQ ID NO: 1888
  Synthetic

SEQ ID NO: 2147 - RNA, 42 nt, Artificial Sequence; identical to SEQ ID NO: 1888
  Synthetic

SEQ ID NO: 2148 - RNA, 42 nt, Artificial Sequence; identical to SEQ ID NO: 1888
  Synthetic

SEQ ID NO: 2149 - RNA, 42 nt, Artificial Sequence; identical to SEQ ID NO: 1888
  Synthetic

SEQ ID NO: 2150 - RNA, 42 nt, Artificial Sequence; identical to SEQ ID NO: 1888
  Synthetic

SEQ ID NO: 2151 - RNA, 42 nt, Artificial Sequence; identical to SEQ ID NO: 1888
  Synthetic

SEQ ID NO: 2152 - RNA, 42 nt, Artificial Sequence; identical to SEQ ID NO: 1888
  Synthetic

SEQ ID NO: 2153 - RNA, 42 nt, Artificial Sequence; identical to SEQ ID NO: 1888
  Synthetic

SEQ ID NO: 2154 - RNA, 42 nt, Artificial Sequence; identical to SEQ ID NO: 1888
  Synthetic

SEQ ID NO: 2155 - RNA, 42 nt, Artificial Sequence; identical to SEQ ID NO: 1888
  Synthetic

SEQ ID NO: 2156 - RNA, 42 nt, Artificial Sequence; identical to SEQ ID NO: 1888
  Synthetic

SEQ ID NO: 2157 - RNA, 42 nt, Artificial Sequence; identical to SEQ ID NO: 1888
  Synthetic

SEQ ID NO: 2158 - RNA, 42 nt, Artificial Sequence; identical to SEQ ID NO: 1888
  Synthetic

SEQ ID NO: 2159 - RNA, 42 nt, Artificial Sequence; identical to SEQ ID NO: 1888
  Synthetic

SEQ ID NO: 2160 - RNA, 42 nt, Artificial Sequence; identical to SEQ ID NO: 1888
  Synthetic

SEQ ID NO: 2161 - RNA, 42 nt, Artificial Sequence; identical to SEQ ID NO: 1888
  Synthetic

SEQ ID NO: 2162 - RNA, 42 nt, Artificial Sequence; identical to SEQ ID NO: 1888
  Synthetic

SEQ ID NO: 2163 - RNA, 42 nt, Artificial Sequence; identical to SEQ ID NO: 1888
  Synthetic

SEQ ID NO: 2164 - RNA, 42 nt, Artificial Sequence; identical to SEQ ID NO: 1888
  Synthetic

SEQ ID NO: 2165 - RNA, 42 nt, Artificial Sequence; identical to SEQ ID NO: 1888
  Synthetic

SEQ ID NO: 2166 - RNA, 42 nt, Artificial Sequence; identical to SEQ ID NO: 1888
  Synthetic

SEQ ID NO: 2167 - RNA, 42 nt, Artificial Sequence; identical to SEQ ID NO: 1888
  Synthetic

SEQ ID NO: 2168 - RNA, 42 nt, Artificial Sequence; identical to SEQ ID NO: 1888
  Synthetic

SEQ ID NO: 2169 - RNA, 42 nt, Artificial Sequence; identical to SEQ ID NO: 1888
  Synthetic

SEQ ID NO: 2170 - RNA, 42 nt, Artificial Sequence; identical to SEQ ID NO: 1888
  Synthetic

SEQ ID NO: 2171 - RNA, 42 nt, Artificial Sequence; identical to SEQ ID NO: 1321
  Synthetic

SEQ ID NO: 2172 - RNA, 42 nt, Artificial Sequence; identical to SEQ ID NO: 1321
  Synthetic

SEQ ID NO: 2173 - RNA, 42 nt, Artificial Sequence; identical to SEQ ID NO: 1321
  Synthetic

SEQ ID NO: 2174 - RNA, 42 nt, Artificial Sequence; identical to SEQ ID NO: 1321
  Synthetic

SEQ ID NO: 2175 - RNA, 42 nt, Artificial Sequence; identical to SEQ ID NO: 1321
  Synthetic

SEQ ID NO: 2176 - RNA, 42 nt, Artificial Sequence; identical to SEQ ID NO: 1321
  Synthetic

SEQ ID NO: 2177 - RNA, 42 nt, Artificial Sequence; identical to SEQ ID NO: 1321
  Synthetic

SEQ ID NO: 2178 - RNA, 42 nt, Artificial Sequence; identical to SEQ ID NO: 1321
  Synthetic

SEQ ID NO: 2179 - RNA, 42 nt, Artificial Sequence; identical to SEQ ID NO: 1321
  Synthetic

SEQ ID NO: 2180 - RNA, 42 nt, Artificial Sequence; identical to SEQ ID NO: 1321
  Synthetic

SEQ ID NO: 2181 - RNA, 42 nt, Artificial Sequence; identical to SEQ ID NO: 1321
  Synthetic

SEQ ID NO: 2182 - RNA, 42 nt, Artificial Sequence; identical to SEQ ID NO: 1321
  Synthetic

SEQ ID NO: 2183 - RNA, 42 nt, Artificial Sequence; identical to SEQ ID NO: 1321
  Synthetic

SEQ ID NO: 2184 - RNA, 42 nt, Artificial Sequence; identical to SEQ ID NO: 1321
  Synthetic

SEQ ID NO: 2185 - RNA, 42 nt, Artificial Sequence; identical to SEQ ID NO: 1321
  Synthetic

SEQ ID NO: 2186 - RNA, 42 nt, Artificial Sequence; identical to SEQ ID NO: 1321
  Synthetic

SEQ ID NO: 2187 - RNA, 42 nt, Artificial Sequence; identical to SEQ ID NO: 1321
  Synthetic

SEQ ID NO: 2188 - RNA, 42 nt, Artificial Sequence; identical to SEQ ID NO: 1321
  Synthetic

SEQ ID NO: 2189 - RNA, 42 nt, Artificial Sequence; identical to SEQ ID NO: 1321
  Synthetic

SEQ ID NO: 2190 - RNA, 42 nt, Artificial Sequence; identical to SEQ ID NO: 1321
  Synthetic

SEQ ID NO: 2191 - RNA, 42 nt, Artificial Sequence; identical to SEQ ID NO: 1321
  Synthetic

SEQ ID NO: 2192 - RNA, 42 nt, Artificial Sequence; identical to SEQ ID NO: 1321
  Synthetic

SEQ ID NO: 2193 - RNA, 42 nt, Artificial Sequence; identical to SEQ ID NO: 1321
  Synthetic

SEQ ID NO: 2194 - RNA, 42 nt, Artificial Sequence; identical to SEQ ID NO: 1321
  Synthetic

SEQ ID NO: 2195 - RNA, 42 nt, Artificial Sequence; identical to SEQ ID NO: 1321
  Synthetic

SEQ ID NO: 2196 - RNA, 42 nt, Artificial Sequence; identical to SEQ ID NO: 1321
  Synthetic

SEQ ID NO: 2197 - RNA, 42 nt, Artificial Sequence; identical to SEQ ID NO: 1321
  Synthetic

SEQ ID NO: 2198 - RNA, 42 nt, Artificial Sequence; identical to SEQ ID NO: 1321
  Synthetic

SEQ ID NO: 2199 - RNA, 42 nt, Artificial Sequence; identical to SEQ ID NO: 1321
  Synthetic

SEQ ID NO: 2200 - RNA, 42 nt, Artificial Sequence; identical to SEQ ID NO: 1321
  Synthetic

SEQ ID NO: 2201 - RNA, 42 nt, Artificial Sequence; identical to SEQ ID NO: 1321
  Synthetic

SEQ ID NO: 2202 - RNA, 42 nt, Artificial Sequence; identical to SEQ ID NO: 1321
  Synthetic

SEQ ID NO: 2203 - RNA, 42 nt, Artificial Sequence; identical to SEQ ID NO: 1321
  Synthetic

SEQ ID NO: 2204 - RNA, 42 nt, Artificial Sequence; identical to SEQ ID NO: 1321
  Synthetic

SEQ ID NO: 2205 - RNA, 42 nt, Artificial Sequence; identical to SEQ ID NO: 1321
  Synthetic

SEQ ID NO: 2206 - RNA, 42 nt, Artificial Sequence; identical to SEQ ID NO: 1321
  Synthetic

SEQ ID NO: 2207 - RNA, 42 nt, Artificial Sequence; identical to SEQ ID NO: 1321
  Synthetic

SEQ ID NO: 2208 - RNA, 42 nt, Artificial Sequence; identical to SEQ ID NO: 1321
  Synthetic

SEQ ID NO: 2209 - RNA, 42 nt, Artificial Sequence; identical to SEQ ID NO: 1321
  Synthetic

SEQ ID NO: 2210 - RNA, 42 nt, Artificial Sequence; identical to SEQ ID NO: 1321
  Synthetic

SEQ ID NO: 2211 - RNA, 42 nt, Artificial Sequence; identical to SEQ ID NO: 1321
  Synthetic

SEQ ID NO: 2212 - RNA, 42 nt, Artificial Sequence; identical to SEQ ID NO: 1321
  Synthetic

SEQ ID NO: 2213 - RNA, 42 nt, Artificial Sequence; identical to SEQ ID NO: 1321
  Synthetic

SEQ ID NO: 2214 - RNA, 42 nt, Artificial Sequence; identical to SEQ ID NO: 1321
  Synthetic

SEQ ID NO: 2215 - RNA, 42 nt, Artificial Sequence; identical to SEQ ID NO: 1321
  Synthetic

SEQ ID NO: 2216 - RNA, 42 nt, Artificial Sequence; identical to SEQ ID NO: 1321
  Synthetic

SEQ ID NO: 2217 - RNA, 42 nt, Artificial Sequence; identical to SEQ ID NO: 1321
  Synthetic

SEQ ID NO: 2218 - RNA, 42 nt, Artificial Sequence; identical to SEQ ID NO: 1321
  Synthetic

SEQ ID NO: 2219 - RNA, 42 nt, Artificial Sequence; identical to SEQ ID NO: 1321
  Synthetic

SEQ ID NO: 2220 - RNA, 42 nt, Artificial Sequence; identical to SEQ ID NO: 1321
  Synthetic

SEQ ID NO: 2221 - RNA, 42 nt, Artificial Sequence; identical to SEQ ID NO: 1321
  Synthetic

SEQ ID NO: 2222 - RNA, 42 nt, Artificial Sequence; identical to SEQ ID NO: 1321
  Synthetic

SEQ ID NO: 2223 - RNA, 42 nt, Artificial Sequence; identical to SEQ ID NO: 1321
  Synthetic

SEQ ID NO: 2224 - RNA, 42 nt, Artificial Sequence; identical to SEQ ID NO: 1321
  Synthetic

SEQ ID NO: 2225 - RNA, 42 nt, Artificial Sequence; identical to SEQ ID NO: 1321
  Synthetic

SEQ ID NO: 2226 - RNA, 42 nt, Artificial Sequence; identical to SEQ ID NO: 1321
  Synthetic

SEQ ID NO: 2227 - RNA, 42 nt, Artificial Sequence; identical to SEQ ID NO: 1321
  Synthetic

SEQ ID NO: 2228 - RNA, 42 nt, Artificial Sequence; identical to SEQ ID NO: 1321
  Synthetic

SEQ ID NO: 2229 - RNA, 42 nt, Artificial Sequence; identical to SEQ ID NO: 1321
  Synthetic

SEQ ID NO: 2230 - RNA, 42 nt, Artificial Sequence; identical to SEQ ID NO: 1321
  Synthetic

SEQ ID NO: 2231 - RNA, 42 nt, Artificial Sequence; identical to SEQ ID NO: 1321
  Synthetic

SEQ ID NO: 2232 - RNA, 42 nt, Artificial Sequence; identical to SEQ ID NO: 1321
  Synthetic

SEQ ID NO: 2233 - RNA, 42 nt, Artificial Sequence; identical to SEQ ID NO: 1321
  Synthetic

SEQ ID NO: 2234 - RNA, 42 nt, Artificial Sequence; identical to SEQ ID NO: 1321
  Synthetic

SEQ ID NO: 2235 - RNA, 42 nt, Artificial Sequence; identical to SEQ ID NO: 1321
  Synthetic

SEQ ID NO: 2236 - RNA, 42 nt, Artificial Sequence; identical to SEQ ID NO: 1321
  Synthetic

SEQ ID NO: 2237 - RNA, 42 nt, Artificial Sequence; identical to SEQ ID NO: 1321
  Synthetic

SEQ ID NO: 2238 - RNA, 42 nt, Artificial Sequence; identical to SEQ ID NO: 1321
  Synthetic

SEQ ID NO: 2239 - RNA, 42 nt, Artificial Sequence; identical to SEQ ID NO: 1321
  Synthetic

SEQ ID NO: 2240 - RNA, 42 nt, Artificial Sequence; identical to SEQ ID NO: 1321
  Synthetic

SEQ ID NO: 2241 - RNA, 42 nt, Artificial Sequence; identical to SEQ ID NO: 1321
  Synthetic

SEQ ID NO: 2242 - RNA, 42 nt, Artificial Sequence; identical to SEQ ID NO: 1321
  Synthetic

SEQ ID NO: 2243 - RNA, 42 nt, Artificial Sequence; identical to SEQ ID NO: 1321
  Synthetic

SEQ ID NO: 2244 - RNA, 42 nt, Artificial Sequence; identical to SEQ ID NO: 1321
  Synthetic

SEQ ID NO: 2245 - RNA, 42 nt, Artificial Sequence; identical to SEQ ID NO: 1321
  Synthetic

SEQ ID NO: 2246 - RNA, 42 nt, Artificial Sequence; identical to SEQ ID NO: 1321
  Synthetic

SEQ ID NO: 2247 - RNA, 42 nt, Artificial Sequence; identical to SEQ ID NO: 1321
  Synthetic

SEQ ID NO: 2248 - RNA, 42 nt, Artificial Sequence; identical to SEQ ID NO: 1321
  Synthetic

SEQ ID NO: 2249 - RNA, 42 nt, Artificial Sequence; identical to SEQ ID NO: 1321
  Synthetic

SEQ ID NO: 2250 - RNA, 42 nt, Artificial Sequence; identical to SEQ ID NO: 1321
  Synthetic

SEQ ID NO: 2251 - RNA, 42 nt, Artificial Sequence; identical to SEQ ID NO: 1321
  Synthetic

SEQ ID NO: 2252 - RNA, 42 nt, Artificial Sequence; identical to SEQ ID NO: 1321
  Synthetic

SEQ ID NO: 2253 - RNA, 42 nt, Artificial Sequence; identical to SEQ ID NO: 1321
  Synthetic

SEQ ID NO: 2254 - RNA, 42 nt, Artificial Sequence; identical to SEQ ID NO: 1321
  Synthetic

SEQ ID NO: 2255 - RNA, 42 nt, Artificial Sequence; identical to SEQ ID NO: 1321
  Synthetic

SEQ ID NO: 2256 - RNA, 42 nt, Artificial Sequence; identical to SEQ ID NO: 1321
  Synthetic

SEQ ID NO: 2257 - RNA, 42 nt, Artificial Sequence; identical to SEQ ID NO: 1321
  Synthetic

SEQ ID NO: 2258 - RNA, 42 nt, Artificial Sequence; identical to SEQ ID NO: 1321
  Synthetic

SEQ ID NO: 2259 - RNA, 42 nt, Artificial Sequence; identical to SEQ ID NO: 1321
  Synthetic

SEQ ID NO: 2260 - RNA, 42 nt, Artificial Sequence; identical to SEQ ID NO: 1321
  Synthetic

SEQ ID NO: 2261 - RNA, 42 nt, Artificial Sequence; identical to SEQ ID NO: 1321
  Synthetic

SEQ ID NO: 2262 - RNA, 42 nt, Artificial Sequence; identical to SEQ ID NO: 1321
  Synthetic

SEQ ID NO: 2263 - RNA, 42 nt, Artificial Sequence; identical to SEQ ID NO: 1321
  Synthetic

SEQ ID NO: 2264 - RNA, 42 nt, Artificial Sequence; identical to SEQ ID NO: 1321
  Synthetic

SEQ ID NO: 2265 - RNA, 42 nt, Artificial Sequence; identical to SEQ ID NO: 1321
  Synthetic

SEQ ID NO: 2266 - RNA, 42 nt, Artificial Sequence; identical to SEQ ID NO: 1321
  Synthetic

SEQ ID NO: 2267 - RNA, 42 nt, Artificial Sequence; identical to SEQ ID NO: 1321
  Synthetic

SEQ ID NO: 2268 - RNA, 42 nt, Artificial Sequence; identical to SEQ ID NO: 1321
  Synthetic

SEQ ID NO: 2269 - RNA, 42 nt, Artificial Sequence; identical to SEQ ID NO: 1321
  Synthetic

SEQ ID NO: 2270 - RNA, 42 nt, Artificial Sequence; identical to SEQ ID NO: 1321
  Synthetic

SEQ ID NO: 2271 - RNA, 42 nt, Artificial Sequence; identical to SEQ ID NO: 1321
  Synthetic

SEQ ID NO: 2272 - RNA, 42 nt, Artificial Sequence; identical to SEQ ID NO: 1321
  Synthetic

SEQ ID NO: 2273 - RNA, 42 nt, Artificial Sequence; identical to SEQ ID NO: 1321
  Synthetic

SEQ ID NO: 2274 - RNA, 42 nt, Artificial Sequence; identical to SEQ ID NO: 1321
  Synthetic

SEQ ID NO: 2275 - RNA, 42 nt, Artificial Sequence; identical to SEQ ID NO: 1321
  Synthetic

SEQ ID NO: 2276 - RNA, 42 nt, Artificial Sequence; identical to SEQ ID NO: 1321
  Synthetic

SEQ ID NO: 2277 - RNA, 42 nt, Artificial Sequence; identical to SEQ ID NO: 1321
  Synthetic

SEQ ID NO: 2278 - RNA, 42 nt, Artificial Sequence; identical to SEQ ID NO: 1321
  Synthetic

SEQ ID NO: 2279 - RNA, 42 nt, Artificial Sequence; identical to SEQ ID NO: 1321
  Synthetic

SEQ ID NO: 2280 - RNA, 42 nt, Artificial Sequence; identical to SEQ ID NO: 1321
  Synthetic

SEQ ID NO: 2281 - RNA, 42 nt, Artificial Sequence; identical to SEQ ID NO: 1321
  Synthetic

SEQ ID NO: 2282 - RNA, 42 nt, Artificial Sequence; identical to SEQ ID NO: 1321
  Synthetic

SEQ ID NO: 2283 - RNA, 42 nt, Artificial Sequence; identical to SEQ ID NO: 1321
  Synthetic

SEQ ID NO: 2284 - RNA, 42 nt, Artificial Sequence; identical to SEQ ID NO: 1321
  Synthetic

SEQ ID NO: 2285 - RNA, 42 nt, Artificial Sequence; identical to SEQ ID NO: 1321
  Synthetic

SEQ ID NO: 2286 - RNA, 42 nt, Artificial Sequence; identical to SEQ ID NO: 1321
  Synthetic

SEQ ID NO: 2287 - RNA, 42 nt, Artificial Sequence; identical to SEQ ID NO: 1321
  Synthetic

SEQ ID NO: 2288 - RNA, 42 nt, Artificial Sequence; identical to SEQ ID NO: 1321
  Synthetic

SEQ ID NO: 2289 - RNA, 42 nt, Artificial Sequence; identical to SEQ ID NO: 1321
  Synthetic

SEQ ID NO: 2290 - RNA, 42 nt, Artificial Sequence; identical to SEQ ID NO: 1321
  Synthetic

SEQ ID NO: 2291 - RNA, 42 nt, Artificial Sequence; identical to SEQ ID NO: 1321
  Synthetic

SEQ ID NO: 2292 - RNA, 42 nt, Artificial Sequence; identical to SEQ ID NO: 1321
  Synthetic

SEQ ID NO: 2293 - RNA, 42 nt, Artificial Sequence; identical to SEQ ID NO: 1321
  Synthetic

SEQ ID NO: 2294 - RNA, 42 nt, Artificial Sequence; identical to SEQ ID NO: 1321
  Synthetic

SEQ ID NO: 2295 - RNA, 42 nt, Artificial Sequence; identical to SEQ ID NO: 1321
  Synthetic

SEQ ID NO: 2296 - RNA, 42 nt, Artificial Sequence; identical to SEQ ID NO: 1321
  Synthetic

SEQ ID NO: 2297 - RNA, 42 nt, Artificial Sequence; identical to SEQ ID NO: 1321
  Synthetic

SEQ ID NO: 2298 - RNA, 42 nt, Artificial Sequence; identical to SEQ ID NO: 1321
  Synthetic

SEQ ID NO: 2299 - RNA, 42 nt, Artificial Sequence; identical to SEQ ID NO: 1321
  Synthetic

SEQ ID NO: 2300 - RNA, 42 nt, Artificial Sequence; identical to SEQ ID NO: 1321
  Synthetic

SEQ ID NO: 2301 - RNA, 42 nt, Artificial Sequence; identical to SEQ ID NO: 1321
  Synthetic

SEQ ID NO: 2302 - RNA, 42 nt, Artificial Sequence; identical to SEQ ID NO: 1321
  Synthetic

SEQ ID NO: 2303 - RNA, 42 nt, Artificial Sequence; identical to SEQ ID NO: 1321
  Synthetic

SEQ ID NO: 2304 - RNA, 42 nt, Artificial Sequence; identical to SEQ ID NO: 1321
  Synthetic

SEQ ID NO: 2305 - RNA, 42 nt, Artificial Sequence; identical to SEQ ID NO: 1321
  Synthetic

SEQ ID NO: 2306 - RNA, 42 nt, Artificial Sequence; identical to SEQ ID NO: 1321
  Synthetic

SEQ ID NO: 2307 - RNA, 42 nt, Artificial Sequence; identical to SEQ ID NO: 1321
  Synthetic

SEQ ID NO: 2308 - RNA, 42 nt, Artificial Sequence; identical to SEQ ID NO: 1321
  Synthetic

SEQ ID NO: 2309 - RNA, 42 nt, Artificial Sequence; identical to SEQ ID NO: 1321
  Synthetic

SEQ ID NO: 2310 - RNA, 42 nt, Artificial Sequence; identical to SEQ ID NO: 1321
  Synthetic

SEQ ID NO: 2311 - RNA, 42 nt, Artificial Sequence; identical to SEQ ID NO: 1321
  Synthetic

SEQ ID NO: 2312 - RNA, 42 nt, Artificial Sequence; identical to SEQ ID NO: 1321
  Synthetic

SEQ ID NO: 2313 - RNA, 42 nt, Artificial Sequence; identical to SEQ ID NO: 1321
  Synthetic

SEQ ID NO: 2314 - RNA, 42 nt, Artificial Sequence; identical to SEQ ID NO: 1321
  Synthetic

SEQ ID NO: 2315 - RNA, 42 nt, Artificial Sequence; identical to SEQ ID NO: 1321
  Synthetic

SEQ ID NO: 2316 - RNA, 42 nt, Artificial Sequence; identical to SEQ ID NO: 1321
  Synthetic

SEQ ID NO: 2317 - RNA, 42 nt, Artificial Sequence; identical to SEQ ID NO: 1321
  Synthetic

SEQ ID NO: 2318 - RNA, 42 nt, Artificial Sequence; identical to SEQ ID NO: 1321
  Synthetic

SEQ ID NO: 2319 - RNA, 42 nt, Artificial Sequence; identical to SEQ ID NO: 1321
  Synthetic

SEQ ID NO: 2320 - RNA, 42 nt, Artificial Sequence; identical to SEQ ID NO: 1321
  Synthetic

SEQ ID NO: 2321 - RNA, 42 nt, Artificial Sequence; identical to SEQ ID NO: 1321
  Synthetic

SEQ ID NO: 2322 - RNA, 42 nt, Artificial Sequence; identical to SEQ ID NO: 1321
  Synthetic

SEQ ID NO: 2323 - RNA, 42 nt, Artificial Sequence; identical to SEQ ID NO: 1321
  Synthetic

SEQ ID NO: 2324 - RNA, 42 nt, Artificial Sequence; identical to SEQ ID NO: 1321
  Synthetic

SEQ ID NO: 2325 - RNA, 42 nt, Artificial Sequence; identical to SEQ ID NO: 1321
  Synthetic

SEQ ID NO: 2326 - RNA, 42 nt, Artificial Sequence; identical to SEQ ID NO: 1321
  Synthetic

SEQ ID NO: 2327 - RNA, 42 nt, Artificial Sequence; identical to SEQ ID NO: 1321
  Synthetic

SEQ ID NO: 2328 - RNA, 42 nt, Artificial Sequence; identical to SEQ ID NO: 1321
  Synthetic

SEQ ID NO: 2329 - RNA, 42 nt, Artificial Sequence; identical to SEQ ID NO: 1321
  Synthetic

SEQ ID NO: 2330 - RNA, 42 nt, Artificial Sequence; identical to SEQ ID NO: 1321
  Synthetic

SEQ ID NO: 2331 - RNA, 42 nt, Artificial Sequence; identical to SEQ ID NO: 1321
  Synthetic

SEQ ID NO: 2332 - RNA, 42 nt, Artificial Sequence; identical to SEQ ID NO: 1321
  Synthetic

SEQ ID NO: 2333 - RNA, 42 nt, Artificial Sequence; identical to SEQ ID NO: 1321
  Synthetic

SEQ ID NO: 2334 - RNA, 42 nt, Artificial Sequence; identical to SEQ ID NO: 1321
  Synthetic

SEQ ID NO: 2335 - RNA, 42 nt, Artificial Sequence; identical to SEQ ID NO: 1321
  Synthetic

SEQ ID NO: 2336 - RNA, 42 nt, Artificial Sequence; identical to SEQ ID NO: 1321
  Synthetic

SEQ ID NO: 2337 - RNA, 42 nt, Artificial Sequence; identical to SEQ ID NO: 1321
  Synthetic

SEQ ID NO: 2338 - RNA, 42 nt, Artificial Sequence; identical to SEQ ID NO: 1321
  Synthetic

SEQ ID NO: 2339 - RNA, 42 nt, Artificial Sequence; identical to SEQ ID NO: 1321
  Synthetic

SEQ ID NO: 2340 - RNA, 42 nt, Artificial Sequence; identical to SEQ ID NO: 1321
  Synthetic

SEQ ID NO: 2341 - RNA, 42 nt, Artificial Sequence; identical to SEQ ID NO: 1321
  Synthetic

SEQ ID NO: 2342 - RNA, 42 nt, Artificial Sequence; identical to SEQ ID NO: 1321
  Synthetic

SEQ ID NO: 2343 - RNA, 42 nt, Artificial Sequence; identical to SEQ ID NO: 1321
  Synthetic

SEQ ID NO: 2344 - RNA, 42 nt, Artificial Sequence; identical to SEQ ID NO: 1321
  Synthetic

SEQ ID NO: 2345 - RNA, 42 nt, Artificial Sequence; identical to SEQ ID NO: 1321
  Synthetic

SEQ ID NO: 2346 - RNA, 42 nt, Artificial Sequence; identical to SEQ ID NO: 1321
  Synthetic

SEQ ID NO: 2347 - RNA, 42 nt, Artificial Sequence; identical to SEQ ID NO: 1321
  Synthetic

SEQ ID NO: 2348 - RNA, 42 nt, Artificial Sequence; identical to SEQ ID NO: 1321
  Synthetic

SEQ ID NO: 2349 - RNA, 42 nt, Artificial Sequence; identical to SEQ ID NO: 1321
  Synthetic

SEQ ID NO: 2350 - RNA, 42 nt, Artificial Sequence; identical to SEQ ID NO: 1321
  Synthetic

SEQ ID NO: 2351 - RNA, 42 nt, Artificial Sequence; identical to SEQ ID NO: 1321
  Synthetic

SEQ ID NO: 2352 - RNA, 42 nt, Artificial Sequence; identical to SEQ ID NO: 1321
  Synthetic

SEQ ID NO: 2353 - RNA, 42 nt, Artificial Sequence; identical to SEQ ID NO: 1321
  Synthetic

SEQ ID NO: 2354 - RNA, 42 nt, Artificial Sequence; identical to SEQ ID NO: 1321
  Synthetic

SEQ ID NO: 2355 - RNA, 42 nt, Artificial Sequence; identical to SEQ ID NO: 1321
  Synthetic

SEQ ID NO: 2356 - RNA, 42 nt, Artificial Sequence; identical to SEQ ID NO: 1321
  Synthetic

SEQ ID NO: 2357 - RNA, 42 nt, Artificial Sequence; identical to SEQ ID NO: 1321
  Synthetic

SEQ ID NO: 2358 - RNA, 42 nt, Artificial Sequence; identical to SEQ ID NO: 1321
  Synthetic

SEQ ID NO: 2359 - RNA, 42 nt, Artificial Sequence; identical to SEQ ID NO: 1321
  Synthetic

SEQ ID NO: 2360 - RNA, 42 nt, Artificial Sequence; identical to SEQ ID NO: 1321
  Synthetic

SEQ ID NO: 2361 - RNA, 42 nt, Artificial Sequence; identical to SEQ ID NO: 1321
  Synthetic

SEQ ID NO: 2362 - RNA, 42 nt, Artificial Sequence; identical to SEQ ID NO: 1321
  Synthetic

SEQ ID NO: 2363 - RNA, 42 nt, Artificial Sequence; identical to SEQ ID NO: 1321
  Synthetic

SEQ ID NO: 2364 - RNA, 42 nt, Artificial Sequence; identical to SEQ ID NO: 1321
  Synthetic

SEQ ID NO: 2365 - RNA, 42 nt, Artificial Sequence; identical to SEQ ID NO: 1321
  Synthetic

SEQ ID NO: 2366 - RNA, 42 nt, Artificial Sequence; identical to SEQ ID NO: 1321
  Synthetic

SEQ ID NO: 2367 - RNA, 42 nt, Artificial Sequence; identical to SEQ ID NO: 1321
  Synthetic

SEQ ID NO: 2368 - RNA, 42 nt, Artificial Sequence; identical to SEQ ID NO: 1321
  Synthetic

SEQ ID NO: 2369 - RNA, 42 nt, Artificial Sequence; identical to SEQ ID NO: 1321
  Synthetic

SEQ ID NO: 2370 - RNA, 42 nt, Artificial Sequence; identical to SEQ ID NO: 1321
  Synthetic

SEQ ID NO: 2371 - RNA, 42 nt, Artificial Sequence; identical to SEQ ID NO: 1321
  Synthetic

SEQ ID NO: 2372 - RNA, 42 nt, Artificial Sequence; identical to SEQ ID NO: 1321
  Synthetic

SEQ ID NO: 2373 - RNA, 42 nt, Artificial Sequence; identical to SEQ ID NO: 1321
  Synthetic

SEQ ID NO: 2374 - RNA, 42 nt, Artificial Sequence; identical to SEQ ID NO: 1321
  Synthetic

SEQ ID NO: 2375 - RNA, 42 nt, Artificial Sequence; identical to SEQ ID NO: 1321
  Synthetic

SEQ ID NO: 2376 - RNA, 42 nt, Artificial Sequence; identical to SEQ ID NO: 1321
  Synthetic

SEQ ID NO: 2377 - RNA, 42 nt, Artificial Sequence; identical to SEQ ID NO: 1321
  Synthetic

SEQ ID NO: 2378 - RNA, 42 nt, Artificial Sequence; identical to SEQ ID NO: 1321
  Synthetic

SEQ ID NO: 2379 - RNA, 42 nt, Artificial Sequence; identical to SEQ ID NO: 1321
  Synthetic

SEQ ID NO: 2380 - RNA, 42 nt, Artificial Sequence; identical to SEQ ID NO: 1321
  Synthetic

SEQ ID NO: 2381 - RNA, 42 nt, Artificial Sequence; identical to SEQ ID NO: 1321
  Synthetic

SEQ ID NO: 2382 - RNA, 42 nt, Artificial Sequence; identical to SEQ ID NO: 1321
  Synthetic

SEQ ID NO: 2383 - RNA, 42 nt, Artificial Sequence; identical to SEQ ID NO: 1321
  Synthetic

SEQ ID NO: 2384 - RNA, 42 nt, Artificial Sequence; identical to SEQ ID NO: 1321
  Synthetic

SEQ ID NO: 2385 - RNA, 42 nt, Artificial Sequence; identical to SEQ ID NO: 1321
  Synthetic

SEQ ID NO: 2386 - RNA, 42 nt, Artificial Sequence; identical to SEQ ID NO: 1321
  Synthetic

SEQ ID NO: 2387 - RNA, 42 nt, Artificial Sequence; identical to SEQ ID NO: 1321
  Synthetic

SEQ ID NO: 2388 - RNA, 42 nt, Artificial Sequence; identical to SEQ ID NO: 1321
  Synthetic

SEQ ID NO: 2389 - RNA, 42 nt, Artificial Sequence; identical to SEQ ID NO: 1321
  Synthetic

SEQ ID NO: 2390 - RNA, 42 nt, Artificial Sequence; identical to SEQ ID NO: 1321
  Synthetic

SEQ ID NO: 2391 - RNA, 42 nt, Artificial Sequence; identical to SEQ ID NO: 1321
  Synthetic

SEQ ID NO: 2392 - RNA, 42 nt, Artificial Sequence; identical to SEQ ID NO: 1321
  Synthetic

SEQ ID NO: 2393 - RNA, 42 nt, Artificial Sequence; identical to SEQ ID NO: 1321
  Synthetic

SEQ ID NO: 2394 - RNA, 42 nt, Artificial Sequence; identical to SEQ ID NO: 1321
  Synthetic

SEQ ID NO: 2395 - RNA, 42 nt, Artificial Sequence; identical to SEQ ID NO: 1321
  Synthetic

SEQ ID NO: 2396 - RNA, 42 nt, Artificial Sequence; identical to SEQ ID NO: 1321
  Synthetic

SEQ ID NO: 2397 - RNA, 42 nt, Artificial Sequence; identical to SEQ ID NO: 1321
  Synthetic

SEQ ID NO: 2398 - RNA, 42 nt, Artificial Sequence; identical to SEQ ID NO: 1321
  Synthetic

SEQ ID NO: 2399 - RNA, 42 nt, Artificial Sequence; identical to SEQ ID NO: 1321
  Synthetic

SEQ ID NO: 2400 - RNA, 42 nt, Artificial Sequence; identical to SEQ ID NO: 1321
  Synthetic

SEQ ID NO: 2401 - RNA, 42 nt, Artificial Sequence; identical to SEQ ID NO: 1321
  Synthetic

SEQ ID NO: 2402 - RNA, 42 nt, Artificial Sequence; identical to SEQ ID NO: 1321
  Synthetic

SEQ ID NO: 2403 - RNA, 42 nt, Artificial Sequence; identical to SEQ ID NO: 1321
  Synthetic

SEQ ID NO: 2404 - RNA, 42 nt, Artificial Sequence; identical to SEQ ID NO: 1321
  Synthetic

SEQ ID NO: 2405 - RNA, 42 nt, Artificial Sequence; identical to SEQ ID NO: 1321
  Synthetic

SEQ ID NO: 2406 - RNA, 42 nt, Artificial Sequence; identical to SEQ ID NO: 1321
  Synthetic

SEQ ID NO: 2407 - RNA, 42 nt, Artificial Sequence; identical to SEQ ID NO: 1321
  Synthetic

SEQ ID NO: 2408 - RNA, 42 nt, Artificial Sequence; identical to SEQ ID NO: 1321
  Synthetic

SEQ ID NO: 2409 - RNA, 42 nt, Artificial Sequence; identical to SEQ ID NO: 1321
  Synthetic

SEQ ID NO: 2410 - RNA, 42 nt, Artificial Sequence; identical to SEQ ID NO: 1321
  Synthetic

SEQ ID NO: 2411 - RNA, 42 nt, Artificial Sequence; identical to SEQ ID NO: 1321
  Synthetic

SEQ ID NO: 2412 - RNA, 42 nt, Artificial Sequence; identical to SEQ ID NO: 1321
  Synthetic

SEQ ID NO: 2413 - RNA, 42 nt, Artificial Sequence; identical to SEQ ID NO: 1321
  Synthetic

SEQ ID NO: 2414 - RNA, 42 nt, Artificial Sequence; identical to SEQ ID NO: 1321
  Synthetic

SEQ ID NO: 2415 - RNA, 42 nt, Artificial Sequence; identical to SEQ ID NO: 1321
  Synthetic

SEQ ID NO: 2416 - RNA, 42 nt, Artificial Sequence; identical to SEQ ID NO: 1321
  Synthetic

SEQ ID NO: 2417 - RNA, 42 nt, Artificial Sequence; identical to SEQ ID NO: 1321
  Synthetic

SEQ ID NO: 2418 - RNA, 42 nt, Artificial Sequence; identical to SEQ ID NO: 1321
  Synthetic

SEQ ID NO: 2419 - RNA, 42 nt, Artificial Sequence; identical to SEQ ID NO: 1321
  Synthetic

SEQ ID NO: 2420 - RNA, 42 nt, Artificial Sequence; identical to SEQ ID NO: 1321
  Synthetic

SEQ ID NO: 2421 - RNA, 42 nt, Artificial Sequence; identical to SEQ ID NO: 1321
  Synthetic

SEQ ID NO: 2422 - RNA, 42 nt, Artificial Sequence; identical to SEQ ID NO: 1321
  Synthetic

SEQ ID NO: 2423 - RNA, 42 nt, Artificial Sequence; identical to SEQ ID NO: 1321
  Synthetic

SEQ ID NO: 2424 - RNA, 42 nt, Artificial Sequence; identical to SEQ ID NO: 1321
  Synthetic

SEQ ID NO: 2425 - RNA, 42 nt, Artificial Sequence; identical to SEQ ID NO: 1321
  Synthetic

SEQ ID NO: 2426 - RNA, 42 nt, Artificial Sequence; identical to SEQ ID NO: 1321
  Synthetic

SEQ ID NO: 2427 - RNA, 42 nt, Artificial Sequence; identical to SEQ ID NO: 1321
  Synthetic

SEQ ID NO: 2428 - RNA, 42 nt, Artificial Sequence; identical to SEQ ID NO: 1321
  Synthetic

SEQ ID NO: 2429 - RNA, 42 nt, Artificial Sequence; identical to SEQ ID NO: 1321
  Synthetic

SEQ ID NO: 2430 - RNA, 42 nt, Artificial Sequence; identical to SEQ ID NO: 1321
  Synthetic

SEQ ID NO: 2431 - RNA, 42 nt, Artificial Sequence; identical to SEQ ID NO: 1321
  Synthetic

SEQ ID NO: 2432 - RNA, 42 nt, Artificial Sequence; identical to SEQ ID NO: 1321
  Synthetic

SEQ ID NO: 2433 - RNA, 42 nt, Artificial Sequence; identical to SEQ ID NO: 1321
  Synthetic

SEQ ID NO: 2434 - RNA, 42 nt, Artificial Sequence; identical to SEQ ID NO: 1321
  Synthetic

SEQ ID NO: 2435 - RNA, 42 nt, Artificial Sequence; identical to SEQ ID NO: 1321
  Synthetic

SEQ ID NO: 2436 - RNA, 42 nt, Artificial Sequence; identical to SEQ ID NO: 1321
  Synthetic

SEQ ID NO: 2437 - RNA, 42 nt, Artificial Sequence; identical to SEQ ID NO: 1321
  Synthetic

SEQ ID NO: 2438 - RNA, 42 nt, Artificial Sequence; identical to SEQ ID NO: 1321
  Synthetic

SEQ ID NO: 2439 - RNA, 42 nt, Artificial Sequence; identical to SEQ ID NO: 1321
  Synthetic

SEQ ID NO: 2440 - RNA, 42 nt, Artificial Sequence; identical to SEQ ID NO: 1321
  Synthetic

SEQ ID NO: 2441 - RNA, 42 nt, Artificial Sequence; identical to SEQ ID NO: 1321
  Synthetic

SEQ ID NO: 2442 - RNA, 42 nt, Artificial Sequence; identical to SEQ ID NO: 1321
  Synthetic

SEQ ID NO: 2443 - RNA, 42 nt, Artificial Sequence; identical to SEQ ID NO: 1321
  Synthetic

SEQ ID NO: 2444 - RNA, 42 nt, Artificial Sequence; identical to SEQ ID NO: 1321
  Synthetic

SEQ ID NO: 2445 - RNA, 42 nt, Artificial Sequence; identical to SEQ ID NO: 1321
  Synthetic

SEQ ID NO: 2446 - RNA, 42 nt, Artificial Sequence; identical to SEQ ID NO: 1321
  Synthetic

SEQ ID NO: 2447 - RNA, 42 nt, Artificial Sequence; identical to SEQ ID NO: 1321
  Synthetic

SEQ ID NO: 2448 - RNA, 42 nt, Artificial Sequence; identical to SEQ ID NO: 1321
  Synthetic

SEQ ID NO: 2449 - RNA, 42 nt, Artificial Sequence; identical to SEQ ID NO: 1321
  Synthetic

SEQ ID NO: 2450 - RNA, 42 nt, Artificial Sequence; identical to SEQ ID NO: 1321
  Synthetic

SEQ ID NO: 2451 - RNA, 42 nt, Artificial Sequence; identical to SEQ ID NO: 1321
  Synthetic

SEQ ID NO: 2452 - RNA, 42 nt, Artificial Sequence; identical to SEQ ID NO: 1321
  Synthetic

SEQ ID NO: 2453 - RNA, 42 nt, Artificial Sequence
  Synthetic
aaaggcugcugaugacaccuguuuuagagcuaugcuguuuug

SEQ ID NO: 2454 - RNA, 42 nt, Artificial Sequence; identical to SEQ ID NO: 2453
  Synthetic

SEQ ID NO: 2455 - RNA, 42 nt, Artificial Sequence; identical to SEQ ID NO: 2453
  Synthetic

SEQ ID NO: 2456 - RNA, 42 nt, Artificial Sequence; identical to SEQ ID NO: 2453
  Synthetic

SEQ ID NO: 2457 - RNA, 42 nt, Artificial Sequence; identical to SEQ ID NO: 2453
  Synthetic

SEQ ID NO: 2458 - RNA, 42 nt, Artificial Sequence; identical to SEQ ID NO: 2453
  Synthetic

SEQ ID NO: 2459 - RNA, 42 nt, Artificial Sequence; identical to SEQ ID NO: 2453
  Synthetic

SEQ ID NO: 2460 - RNA, 42 nt, Artificial Sequence; identical to SEQ ID NO: 2453
  Synthetic

SEQ ID NO: 2461 - RNA, 42 nt, Artificial Sequence; identical to SEQ ID NO: 2453
  Synthetic

SEQ ID NO: 2462 - RNA, 42 nt, Artificial Sequence; identical to SEQ ID NO: 2453
  Synthetic

SEQ ID NO: 2463 - RNA, 42 nt, Artificial Sequence; identical to SEQ ID NO: 2453
  Synthetic

SEQ ID NO: 2464 - RNA, 42 nt, Artificial Sequence; identical to SEQ ID NO: 2453
  Synthetic

SEQ ID NO: 2465 - RNA, 42 nt, Artificial Sequence; identical to SEQ ID NO: 2453
  Synthetic

SEQ ID NO: 2466 - RNA, 42 nt, Artificial Sequence; identical to SEQ ID NO: 2453
  Synthetic

SEQ ID NO: 2467 - RNA, 42 nt, Artificial Sequence; identical to SEQ ID NO: 2453
  Synthetic

SEQ ID NO: 2468 - RNA, 42 nt, Artificial Sequence; identical to SEQ ID NO: 2453
  Synthetic

SEQ ID NO: 2469 - RNA, 42 nt, Artificial Sequence; identical to SEQ ID NO: 2453
  Synthetic

SEQ ID NO: 2470 - RNA, 42 nt, Artificial Sequence; identical to SEQ ID NO: 2453
  Synthetic

SEQ ID NO: 2471 - RNA, 42 nt, Artificial Sequence; identical to SEQ ID NO: 2453
  Synthetic

SEQ ID NO: 2472 - RNA, 42 nt, Artificial Sequence; identical to SEQ ID NO: 2453
  Synthetic

SEQ ID NO: 2473 - RNA, 42 nt, Artificial Sequence; identical to SEQ ID NO: 2453
  Synthetic

SEQ ID NO: 2474 - RNA, 42 nt, Artificial Sequence; identical to SEQ ID NO: 2453
  Synthetic

SEQ ID NO: 2475 - RNA, 42 nt, Artificial Sequence; identical to SEQ ID NO: 2453
  Synthetic

SEQ ID NO: 2476 - RNA, 42 nt, Artificial Sequence; identical to SEQ ID NO: 2453
  Synthetic

SEQ ID NO: 2477 - RNA, 42 nt, Artificial Sequence; identical to SEQ ID NO: 2453
  Synthetic

SEQ ID NO: 2478 - RNA, 42 nt, Artificial Sequence; identical to SEQ ID NO: 2453
  Synthetic

SEQ ID NO: 2479 - RNA, 42 nt, Artificial Sequence; identical to SEQ ID NO: 2453
  Synthetic

SEQ ID NO: 2480 - RNA, 42 nt, Artificial Sequence; identical to SEQ ID NO: 2453
  Synthetic

SEQ ID NO: 2481 - RNA, 42 nt, Artificial Sequence; identical to SEQ ID NO: 2453
  Synthetic

SEQ ID NO: 2482 - RNA, 42 nt, Artificial Sequence; identical to SEQ ID NO: 2453
  Synthetic

SEQ ID NO: 2483 - RNA, 42 nt, Artificial Sequence; identical to SEQ ID NO: 2453
  Synthetic

SEQ ID NO: 2484 - RNA, 42 nt, Artificial Sequence; identical to SEQ ID NO: 2453
  Synthetic

SEQ ID NO: 2485 - RNA, 42 nt, Artificial Sequence; identical to SEQ ID NO: 2453
  Synthetic

SEQ ID NO: 2486 - RNA, 42 nt, Artificial Sequence; identical to SEQ ID NO: 2453
  Synthetic

SEQ ID NO: 2487 - RNA, 42 nt, Artificial Sequence; identical to SEQ ID NO: 2453
  Synthetic

SEQ ID NO: 2488 - RNA, 42 nt, Artificial Sequence; identical to SEQ ID NO: 2453
  Synthetic

SEQ ID NO: 2489 - RNA, 42 nt, Artificial Sequence; identical to SEQ ID NO: 2453
  Synthetic

SEQ ID NO: 2490 - RNA, 42 nt, Artificial Sequence; identical to SEQ ID NO: 2453
  Synthetic

SEQ ID NO: 2491 - RNA, 42 nt, Artificial Sequence; identical to SEQ ID NO: 2453
  Synthetic

SEQ ID NO: 2492 - RNA, 42 nt, Artificial Sequence; identical to SEQ ID NO: 2453
  Synthetic

SEQ ID NO: 2493 - RNA, 42 nt, Artificial Sequence; identical to SEQ ID NO: 2453
  Synthetic

SEQ ID NO: 2494 - RNA, 42 nt, Artificial Sequence; identical to SEQ ID NO: 2453
  Synthetic

SEQ ID NO: 2495 - RNA, 42 nt, Artificial Sequence; identical to SEQ ID NO: 2453
  Synthetic

SEQ ID NO: 2496 - RNA, 42 nt, Artificial Sequence; identical to SEQ ID NO: 2453
  Synthetic

SEQ ID NO: 2497 - RNA, 42 nt, Artificial Sequence; identical to SEQ ID NO: 2453
  Synthetic

SEQ ID NO: 2498 - RNA, 42 nt, Artificial Sequence; identical to SEQ ID NO: 2453
  Synthetic

SEQ ID NO: 2499 - RNA, 42 nt, Artificial Sequence; identical to SEQ ID NO: 2453
  Synthetic

SEQ ID NO: 2500 - RNA, 42 nt, Artificial Sequence; identical to SEQ ID NO: 2453
  Synthetic

SEQ ID NO: 2501 - RNA, 42 nt, Artificial Sequence; identical to SEQ ID NO: 2453
  Synthetic

SEQ ID NO: 2502 - RNA, 42 nt, Artificial Sequence; identical to SEQ ID NO: 2453
  Synthetic

SEQ ID NO: 2503 - RNA, 42 nt, Artificial Sequence; identical to SEQ ID NO: 2453
  Synthetic

SEQ ID NO: 2504 - RNA, 42 nt, Artificial Sequence; identical to SEQ ID NO: 2453
  Synthetic

SEQ ID NO: 2505 - RNA, 42 nt, Artificial Sequence; identical to SEQ ID NO: 2453
  Synthetic

SEQ ID NO: 2506 - RNA, 42 nt, Artificial Sequence; identical to SEQ ID NO: 2453
  Synthetic

SEQ ID NO: 2507 - RNA, 42 nt, Artificial Sequence; identical to SEQ ID NO: 2453
  Synthetic

SEQ ID NO: 2508 - RNA, 42 nt, Artificial Sequence; identical to SEQ ID NO: 2453
  Synthetic

SEQ ID NO: 2509 - RNA, 42 nt, Artificial Sequence; identical to SEQ ID NO: 2453
  Synthetic

SEQ ID NO: 2510 - RNA, 42 nt, Artificial Sequence; identical to SEQ ID NO: 2453
  Synthetic

SEQ ID NO: 2511 - RNA, 42 nt, Artificial Sequence; identical to SEQ ID NO: 2453
  Synthetic

SEQ ID NO: 2512 - RNA, 42 nt, Artificial Sequence; identical to SEQ ID NO: 2453
  Synthetic

SEQ ID NO: 2513 - RNA, 42 nt, Artificial Sequence; identical to SEQ ID NO: 2453
  Synthetic

SEQ ID NO: 2514 - RNA, 42 nt, Artificial Sequence; identical to SEQ ID NO: 2453
  Synthetic

SEQ ID NO: 2515 - RNA, 42 nt, Artificial Sequence; identical to SEQ ID NO: 2453
  Synthetic

SEQ ID NO: 2516 - RNA, 42 nt, Artificial Sequence; identical to SEQ ID NO: 2453
  Synthetic

SEQ ID NO: 2517 - RNA, 42 nt, Artificial Sequence; identical to SEQ ID NO: 2453
  Synthetic

SEQ ID NO: 2518 - RNA, 42 nt, Artificial Sequence; identical to SEQ ID NO: 2453
  Synthetic

SEQ ID NO: 2519 - RNA, 42 nt, Artificial Sequence; identical to SEQ ID NO: 2453
  Synthetic

SEQ ID NO: 2520 - RNA, 42 nt, Artificial Sequence; identical to SEQ ID NO: 2453
  Synthetic

SEQ ID NO: 2521 - RNA, 42 nt, Artificial Sequence; identical to SEQ ID NO: 2453
  Synthetic

SEQ ID NO: 2522 - RNA, 42 nt, Artificial Sequence; identical to SEQ ID NO: 2453
  Synthetic

SEQ ID NO: 2523 - RNA, 42 nt, Artificial Sequence; identical to SEQ ID NO: 2453
  Synthetic

SEQ ID NO: 2524 - RNA, 42 nt, Artificial Sequence; identical to SEQ ID NO: 2453
  Synthetic

SEQ ID NO: 2525 - RNA, 42 nt, Artificial Sequence; identical to SEQ ID NO: 2453
  Synthetic

SEQ ID NO: 2526 - RNA, 42 nt, Artificial Sequence; identical to SEQ ID NO: 2453
  Synthetic

SEQ ID NO: 2527 - RNA, 42 nt, Artificial Sequence; identical to SEQ ID NO: 2453
  Synthetic

SEQ ID NO: 2528 - RNA, 42 nt, Artificial Sequence; identical to SEQ ID NO: 2453
  Synthetic

SEQ ID NO: 2529 - RNA, 42 nt, Artificial Sequence; identical to SEQ ID NO: 2453
  Synthetic

SEQ ID NO: 2530 - RNA, 42 nt, Artificial Sequence; identical to SEQ ID NO: 2453
  Synthetic

SEQ ID NO: 2531 - RNA, 42 nt, Artificial Sequence; identical to SEQ ID NO: 2453
  Synthetic

SEQ ID NO: 2532 - RNA, 42 nt, Artificial Sequence; identical to SEQ ID NO: 2453
  Synthetic

SEQ ID NO: 2533 - RNA, 42 nt, Artificial Sequence; identical to SEQ ID NO: 2453
  Synthetic

SEQ ID NO: 2534 - RNA, 42 nt, Artificial Sequence; identical to SEQ ID NO: 2453
  Synthetic

SEQ ID NO: 2535 - RNA, 42 nt, Artificial Sequence; identical to SEQ ID NO: 2453
  Synthetic

SEQ ID NO: 2536 - RNA, 42 nt, Artificial Sequence; identical to SEQ ID NO: 2453
  Synthetic

SEQ ID NO: 2537 - RNA, 42 nt, Artificial Sequence; identical to SEQ ID NO: 2453
  Synthetic

SEQ ID NO: 2538 - RNA, 42 nt, Artificial Sequence; identical to SEQ ID NO: 2453
  Synthetic

SEQ ID NO: 2539 - RNA, 42 nt, Artificial Sequence; identical to SEQ ID NO: 2453
  Synthetic

SEQ ID NO: 2540 - RNA, 42 nt, Artificial Sequence; identical to SEQ ID NO: 2453
  Synthetic

SEQ ID NO: 2541 - RNA, 42 nt, Artificial Sequence; identical to SEQ ID NO: 2453
  Synthetic

SEQ ID NO: 2542 - RNA, 42 nt, Artificial Sequence; identical to SEQ ID NO: 2453
  Synthetic

SEQ ID NO: 2543 - RNA, 42 nt, Artificial Sequence; identical to SEQ ID NO: 2453
  Synthetic

SEQ ID NO: 2544 - RNA, 42 nt, Artificial Sequence; identical to SEQ ID NO: 2453
  Synthetic

SEQ ID NO: 2545 - RNA, 42 nt, Artificial Sequence; identical to SEQ ID NO: 2453
  Synthetic

SEQ ID NO: 2546 - RNA, 42 nt, Artificial Sequence; identical to SEQ ID NO: 2453
  Synthetic

SEQ ID NO: 2547 - RNA, 42 nt, Artificial Sequence; identical to SEQ ID NO: 2453
  Synthetic

SEQ ID NO: 2548 - RNA, 42 nt, Artificial Sequence; identical to SEQ ID NO: 2453
  Synthetic

SEQ ID NO: 2549 - RNA, 42 nt, Artificial Sequence; identical to SEQ ID NO: 2453
  Synthetic

SEQ ID NO: 2550 - RNA, 42 nt, Artificial Sequence; identical to SEQ ID NO: 2453
  Synthetic

SEQ ID NO: 2551 - RNA, 42 nt, Artificial Sequence; identical to SEQ ID NO: 2453
  Synthetic

SEQ ID NO: 2552 - RNA, 42 nt, Artificial Sequence; identical to SEQ ID NO: 2453
  Synthetic

SEQ ID NO: 2553 - RNA, 42 nt, Artificial Sequence; identical to SEQ ID NO: 2453
  Synthetic

SEQ ID NO: 2554 - RNA, 42 nt, Artificial Sequence; identical to SEQ ID NO: 2453
  Synthetic

SEQ ID NO: 2555 - RNA, 42 nt, Artificial Sequence; identical to SEQ ID NO: 2453
  Synthetic

SEQ ID NO: 2556 - RNA, 42 nt, Artificial Sequence; identical to SEQ ID NO: 2453
  Synthetic

SEQ ID NO: 2557 - RNA, 42 nt, Artificial Sequence; identical to SEQ ID NO: 2453
  Synthetic

SEQ ID NO: 2558 - RNA, 42 nt, Artificial Sequence; identical to SEQ ID NO: 2453
  Synthetic

SEQ ID NO: 2559 - RNA, 42 nt, Artificial Sequence; identical to SEQ ID NO: 2453
  Synthetic

SEQ ID NO: 2560 - RNA, 42 nt, Artificial Sequence; identical to SEQ ID NO: 2453
  Synthetic

SEQ ID NO: 2561 - RNA, 42 nt, Artificial Sequence; identical to SEQ ID NO: 2453
  Synthetic

SEQ ID NO: 2562 - RNA, 42 nt, Artificial Sequence; identical to SEQ ID NO: 2453
  Synthetic

SEQ ID NO: 2563 - RNA, 42 nt, Artificial Sequence; identical to SEQ ID NO: 2453
  Synthetic

SEQ ID NO: 2564 - RNA, 42 nt, Artificial Sequence; identical to SEQ ID NO: 2453
  Synthetic

SEQ ID NO: 2565 - RNA, 42 nt, Artificial Sequence; identical to SEQ ID NO: 2453
  Synthetic

SEQ ID NO: 2566 - RNA, 42 nt, Artificial Sequence; identical to SEQ ID NO: 2453
  Synthetic

SEQ ID NO: 2567 - RNA, 42 nt, Artificial Sequence; identical to SEQ ID NO: 2453
  Synthetic

SEQ ID NO: 2568 - RNA, 42 nt, Artificial Sequence; identical to SEQ ID NO: 2453
  Synthetic

SEQ ID NO: 2569 - RNA, 42 nt, Artificial Sequence; identical to SEQ ID NO: 2453
  Synthetic

SEQ ID NO: 2570 - RNA, 42 nt, Artificial Sequence; identical to SEQ ID NO: 2453
  Synthetic

SEQ ID NO: 2571 - RNA, 42 nt, Artificial Sequence; identical to SEQ ID NO: 2453
  Synthetic

SEQ ID NO: 2572 - RNA, 42 nt, Artificial Sequence; identical to SEQ ID NO: 2453
  Synthetic

SEQ ID NO: 2573 - RNA, 42 nt, Artificial Sequence; identical to SEQ ID NO: 2453
  Synthetic

SEQ ID NO: 2574 - RNA, 42 nt, Artificial Sequence; identical to SEQ ID NO: 2453
  Synthetic

SEQ ID NO: 2575 - RNA, 42 nt, Artificial Sequence; identical to SEQ ID NO: 2453
  Synthetic

SEQ ID NO: 2576 - RNA, 42 nt, Artificial Sequence; identical to SEQ ID NO: 2453
  Synthetic

SEQ ID NO: 2577 - RNA, 42 nt, Artificial Sequence; identical to SEQ ID NO: 2453
  Synthetic

SEQ ID NO: 2578 - RNA, 42 nt, Artificial Sequence; identical to SEQ ID NO: 2453
  Synthetic

SEQ ID NO: 2579 - RNA, 42 nt, Artificial Sequence; identical to SEQ ID NO: 2453
  Synthetic

SEQ ID NO: 2580 - RNA, 42 nt, Artificial Sequence; identical to SEQ ID NO: 2453
  Synthetic

SEQ ID NO: 2581 - RNA, 42 nt, Artificial Sequence; identical to SEQ ID NO: 2453
  Synthetic

SEQ ID NO: 2582 - RNA, 42 nt, Artificial Sequence; identical to SEQ ID NO: 2453
  Synthetic

SEQ ID NO: 2583 - RNA, 42 nt, Artificial Sequence; identical to SEQ ID NO: 2453
  Synthetic

SEQ ID NO: 2584 - RNA, 42 nt, Artificial Sequence; identical to SEQ ID NO: 2453
  Synthetic

SEQ ID NO: 2585 - RNA, 42 nt, Artificial Sequence; identical to SEQ ID NO: 2453
  Synthetic

SEQ ID NO: 2586 - RNA, 42 nt, Artificial Sequence; identical to SEQ ID NO: 2453
  Synthetic

SEQ ID NO: 2587 - RNA, 42 nt, Artificial Sequence; identical to SEQ ID NO: 2453
  Synthetic

SEQ ID NO: 2588 - RNA, 42 nt, Artificial Sequence; identical to SEQ ID NO: 2453
  Synthetic

SEQ ID NO: 2589 - RNA, 42 nt, Artificial Sequence; identical to SEQ ID NO: 2453
  Synthetic

SEQ ID NO: 2590 - RNA, 42 nt, Artificial Sequence; identical to SEQ ID NO: 2453
  Synthetic

SEQ ID NO: 2591 - RNA, 42 nt, Artificial Sequence; identical to SEQ ID NO: 2453
  Synthetic

SEQ ID NO: 2592 - RNA, 42 nt, Artificial Sequence; identical to SEQ ID NO: 2453
  Synthetic

SEQ ID NO: 2593 - RNA, 42 nt, Artificial Sequence; identical to SEQ ID NO: 2453
  Synthetic

SEQ ID NO: 2594 - RNA, 42 nt, Artificial Sequence; identical to SEQ ID NO: 2453
  Synthetic

SEQ ID NO: 2595 - RNA, 42 nt, Artificial Sequence; identical to SEQ ID NO: 2453
  Synthetic

SEQ ID NO: 2596 - RNA, 42 nt, Artificial Sequence; identical to SEQ ID NO: 2453
  Synthetic

SEQ ID NO: 2597 - RNA, 42 nt, Artificial Sequence; identical to SEQ ID NO: 2453
  Synthetic

SEQ ID NO: 2598 - RNA, 42 nt, Artificial Sequence; identical to SEQ ID NO: 2453
  Synthetic

SEQ ID NO: 2599 - RNA, 42 nt, Artificial Sequence; identical to SEQ ID NO: 2453
  Synthetic

SEQ ID NO: 2600 - RNA, 42 nt, Artificial Sequence; identical to SEQ ID NO: 2453
  Synthetic

SEQ ID NO: 2601 - RNA, 42 nt, Artificial Sequence; identical to SEQ ID NO: 2453
  Synthetic

SEQ ID NO: 2602 - RNA, 42 nt, Artificial Sequence; identical to SEQ ID NO: 2453
  Synthetic

SEQ ID NO: 2603 - RNA, 42 nt, Artificial Sequence; identical to SEQ ID NO: 2453
  Synthetic

SEQ ID NO: 2604 - RNA, 42 nt, Artificial Sequence; identical to SEQ ID NO: 2453
  Synthetic

SEQ ID NO: 2605 - RNA, 42 nt, Artificial Sequence; identical to SEQ ID NO: 2453
  Synthetic

SEQ ID NO: 2606 - RNA, 42 nt, Artificial Sequence; identical to SEQ ID NO: 2453
  Synthetic

SEQ ID NO: 2607 - RNA, 42 nt, Artificial Sequence; identical to SEQ ID NO: 2453
  Synthetic

SEQ ID NO: 2608 - RNA, 42 nt, Artificial Sequence; identical to SEQ ID NO: 2453
  Synthetic

SEQ ID NO: 2609 - RNA, 42 nt, Artificial Sequence; identical to SEQ ID NO: 2453
  Synthetic

SEQ ID NO: 2610 - RNA, 42 nt, Artificial Sequence; identical to SEQ ID NO: 2453
  Synthetic

SEQ ID NO: 2611 - RNA, 42 nt, Artificial Sequence; identical to SEQ ID NO: 2453
  Synthetic

SEQ ID NO: 2612 - RNA, 42 nt, Artificial Sequence; identical to SEQ ID NO: 2453
  Synthetic

SEQ ID NO: 2613 - RNA, 42 nt, Artificial Sequence; identical to SEQ ID NO: 2453
  Synthetic

SEQ ID NO: 2614 - RNA, 42 nt, Artificial Sequence; identical to SEQ ID NO: 2453
  Synthetic

SEQ ID NO: 2615 - RNA, 42 nt, Artificial Sequence; identical to SEQ ID NO: 2453
  Synthetic

SEQ ID NO: 2616 - RNA, 42 nt, Artificial Sequence; identical to SEQ ID NO: 2453
  Synthetic

SEQ ID NO: 2617 - RNA, 42 nt, Artificial Sequence; identical to SEQ ID NO: 2453
  Synthetic

SEQ ID NO: 2618 - RNA, 42 nt, Artificial Sequence; identical to SEQ ID NO: 2453
  Synthetic

SEQ ID NO: 2619 - RNA, 42 nt, Artificial Sequence; identical to SEQ ID NO: 2453
  Synthetic

SEQ ID NO: 2620 - RNA, 42 nt, Artificial Sequence; identical to SEQ ID NO: 2453
  Synthetic

SEQ ID NO: 2621 - RNA, 42 nt, Artificial Sequence; identical to SEQ ID NO: 2453
  Synthetic

SEQ ID NO: 2622 - RNA, 42 nt, Artificial Sequence; identical to SEQ ID NO: 2453
  Synthetic

SEQ ID NO: 2623 - RNA, 42 nt, Artificial Sequence; identical to SEQ ID NO: 2453
  Synthetic

SEQ ID NO: 2624 - RNA, 42 nt, Artificial Sequence; identical to SEQ ID NO: 2453
  Synthetic

SEQ ID NO: 2625 - RNA, 42 nt, Artificial Sequence; identical to SEQ ID NO: 2453
  Synthetic

SEQ ID NO: 2626 - RNA, 42 nt, Artificial Sequence; identical to SEQ ID NO: 2453
  Synthetic

SEQ ID NO: 2627 - RNA, 42 nt, Artificial Sequence; identical to SEQ ID NO: 2453
  Synthetic

SEQ ID NO: 2628 - RNA, 42 nt, Artificial Sequence; identical to SEQ ID NO: 2453
  Synthetic

SEQ ID NO: 2629 - RNA, 42 nt, Artificial Sequence; identical to SEQ ID NO: 2453
  Synthetic

SEQ ID NO: 2630 - RNA, 42 nt, Artificial Sequence; identical to SEQ ID NO: 2453
  Synthetic

SEQ ID NO: 2631 - RNA, 42 nt, Artificial Sequence; identical to SEQ ID NO: 2453
  Synthetic

SEQ ID NO: 2632 - RNA, 42 nt, Artificial Sequence; identical to SEQ ID NO: 2453
  Synthetic

SEQ ID NO: 2633 - RNA, 42 nt, Artificial Sequence; identical to SEQ ID NO: 2453
  Synthetic

SEQ ID NO: 2634 - RNA, 42 nt, Artificial Sequence; identical to SEQ ID NO: 2453
  Synthetic

SEQ ID NO: 2635 - RNA, 42 nt, Artificial Sequence; identical to SEQ ID NO: 2453
  Synthetic

SEQ ID NO: 2636 - RNA, 42 nt, Artificial Sequence; identical to SEQ ID NO: 2453
  Synthetic

SEQ ID NO: 2637 - RNA, 42 nt, Artificial Sequence; identical to SEQ ID NO: 2453
  Synthetic

SEQ ID NO: 2638 - RNA, 42 nt, Artificial Sequence; identical to SEQ ID NO: 2453
  Synthetic

SEQ ID NO: 2639 - RNA, 42 nt, Artificial Sequence; identical to SEQ ID NO: 2453
  Synthetic

SEQ ID NO: 2640 - RNA, 42 nt, Artificial Sequence; identical to SEQ ID NO: 2453
  Synthetic

SEQ ID NO: 2641 - RNA, 42 nt, Artificial Sequence; identical to SEQ ID NO: 2453
  Synthetic

SEQ ID NO: 2642 - RNA, 42 nt, Artificial Sequence; identical to SEQ ID NO: 2453
  Synthetic

SEQ ID NO: 2643 - RNA, 42 nt, Artificial Sequence; identical to SEQ ID NO: 2453
  Synthetic

SEQ ID NO: 2644 - RNA, 42 nt, Artificial Sequence; identical to SEQ ID NO: 2453
  Synthetic

SEQ ID NO: 2645 - RNA, 42 nt, Artificial Sequence; identical to SEQ ID NO: 2453
  Synthetic

SEQ ID NO: 2646 - RNA, 42 nt, Artificial Sequence; identical to SEQ ID NO: 2453
  Synthetic

SEQ ID NO: 2647 - RNA, 42 nt, Artificial Sequence; identical to SEQ ID NO: 2453
  Synthetic

SEQ ID NO: 2648 - RNA, 42 nt, Artificial Sequence; identical to SEQ ID NO: 2453
  Synthetic

SEQ ID NO: 2649 - RNA, 42 nt, Artificial Sequence; identical to SEQ ID NO: 2453
  Synthetic

SEQ ID NO: 2650 - RNA, 42 nt, Artificial Sequence; identical to SEQ ID NO: 2453
  Synthetic

SEQ ID NO: 2651 - RNA, 42 nt, Artificial Sequence; identical to SEQ ID NO: 2453
  Synthetic

SEQ ID NO: 2652 - RNA, 42 nt, Artificial Sequence; identical to SEQ ID NO: 2453
  Synthetic

SEQ ID NO: 2653 - RNA, 42 nt, Artificial Sequence; identical to SEQ ID NO: 2453
  Synthetic

SEQ ID NO: 2654 - RNA, 42 nt, Artificial Sequence; identical to SEQ ID NO: 2453
  Synthetic

SEQ ID NO: 2655 - RNA, 42 nt, Artificial Sequence; identical to SEQ ID NO: 2453
  Synthetic

SEQ ID NO: 2656 - RNA, 42 nt, Artificial Sequence; identical to SEQ ID NO: 2453
  Synthetic

SEQ ID NO: 2657 - RNA, 42 nt, Artificial Sequence; identical to SEQ ID NO: 2453
  Synthetic

SEQ ID NO: 2658 - RNA, 42 nt, Artificial Sequence; identical to SEQ ID NO: 2453
  Synthetic

SEQ ID NO: 2659 - RNA, 42 nt, Artificial Sequence; identical to SEQ ID NO: 2453
  Synthetic

SEQ ID NO: 2660 - RNA, 42 nt, Artificial Sequence; identical to SEQ ID NO: 2453
  Synthetic

SEQ ID NO: 2661 - RNA, 42 nt, Artificial Sequence; identical to SEQ ID NO: 2453
  Synthetic

SEQ ID NO: 2662 - RNA, 42 nt, Artificial Sequence; identical to SEQ ID NO: 2453
  Synthetic

SEQ ID NO: 2663 - RNA, 42 nt, Artificial Sequence; identical to SEQ ID NO: 2453
  Synthetic

SEQ ID NO: 2664 - RNA, 42 nt, Artificial Sequence; identical to SEQ ID NO: 2453
  Synthetic

SEQ ID NO: 2665 - RNA, 42 nt, Artificial Sequence; identical to SEQ ID NO: 2453
  Synthetic

SEQ ID NO: 2666 - RNA, 42 nt, Artificial Sequence; identical to SEQ ID NO: 2453
  Synthetic

SEQ ID NO: 2667 - RNA, 42 nt, Artificial Sequence; identical to SEQ ID NO: 2453
  Synthetic

SEQ ID NO: 2668 - RNA, 42 nt, Artificial Sequence; identical to SEQ ID NO: 2453
  Synthetic

SEQ ID NO: 2669 - RNA, 42 nt, Artificial Sequence; identical to SEQ ID NO: 2453
  Synthetic

SEQ ID NO: 2670 - RNA, 42 nt, Artificial Sequence; identical to SEQ ID NO: 2453
  Synthetic

SEQ ID NO: 2671 - RNA, 42 nt, Artificial Sequence; identical to SEQ ID NO: 2453
  Synthetic

SEQ ID NO: 2672 - RNA, 42 nt, Artificial Sequence; identical to SEQ ID NO: 2453
  Synthetic

SEQ ID NO: 2673 - RNA, 42 nt, Artificial Sequence; identical to SEQ ID NO: 2453
  Synthetic

SEQ ID NO: 2674 - RNA, 42 nt, Artificial Sequence; identical to SEQ ID NO: 2453
  Synthetic

SEQ ID NO: 2675 - RNA, 42 nt, Artificial Sequence; identical to SEQ ID NO: 2453
  Synthetic

SEQ ID NO: 2676 - RNA, 42 nt, Artificial Sequence; identical to SEQ ID NO: 2453
  Synthetic

SEQ ID NO: 2677 - RNA, 42 nt, Artificial Sequence; identical to SEQ ID NO: 2453
  Synthetic

SEQ ID NO: 2678 - RNA, 42 nt, Artificial Sequence; identical to SEQ ID NO: 2453
  Synthetic

SEQ ID NO: 2679 - RNA, 42 nt, Artificial Sequence; identical to SEQ ID NO: 2453
  Synthetic

SEQ ID NO: 2680 - RNA, 42 nt, Artificial Sequence; identical to SEQ ID NO: 2453
  Synthetic

SEQ ID NO: 2681 - RNA, 42 nt, Artificial Sequence; identical to SEQ ID NO: 2453
  Synthetic

SEQ ID NO: 2682 - RNA, 42 nt, Artificial Sequence; identical to SEQ ID NO: 2453
  Synthetic

SEQ ID NO: 2683 - RNA, 42 nt, Artificial Sequence; identical to SEQ ID NO: 2453
  Synthetic

SEQ ID NO: 2684 - RNA, 42 nt, Artificial Sequence; identical to SEQ ID NO: 2453
  Synthetic

SEQ ID NO: 2685 - RNA, 42 nt, Artificial Sequence; identical to SEQ ID NO: 2453
  Synthetic

SEQ ID NO: 2686 - RNA, 42 nt, Artificial Sequence; identical to SEQ ID NO: 2453
  Synthetic

SEQ ID NO: 2687 - RNA, 42 nt, Artificial Sequence; identical to SEQ ID NO: 2453
  Synthetic

SEQ ID NO: 2688 - RNA, 42 nt, Artificial Sequence; identical to SEQ ID NO: 2453
  Synthetic

SEQ ID NO: 2689 - RNA, 42 nt, Artificial Sequence; identical to SEQ ID NO: 2453
  Synthetic

SEQ ID NO: 2690 - RNA, 42 nt, Artificial Sequence; identical to SEQ ID NO: 2453
  Synthetic

SEQ ID NO: 2691 - RNA, 42 nt, Artificial Sequence; identical to SEQ ID NO: 2453
  Synthetic

SEQ ID NO: 2692 - RNA, 42 nt, Artificial Sequence; identical to SEQ ID NO: 2453
  Synthetic

SEQ ID NO: 2693 - RNA, 42 nt, Artificial Sequence; identical to SEQ ID NO: 2453
  Synthetic

SEQ ID NO: 2694 - RNA, 42 nt, Artificial Sequence; identical to SEQ ID NO: 2453
  Synthetic

SEQ ID NO: 2695 - RNA, 42 nt, Artificial Sequence; identical to SEQ ID NO: 2453
  Synthetic

SEQ ID NO: 2696 - RNA, 42 nt, Artificial Sequence; identical to SEQ ID NO: 2453
  Synthetic

SEQ ID NO: 2697 - RNA, 42 nt, Artificial Sequence; identical to SEQ ID NO: 2453
  Synthetic

SEQ ID NO: 2698 - RNA, 42 nt, Artificial Sequence; identical to SEQ ID NO: 2453
  Synthetic

SEQ ID NO: 2699 - RNA, 42 nt, Artificial Sequence; identical to SEQ ID NO: 2453
  Synthetic

SEQ ID NO: 2700 - RNA, 42 nt, Artificial Sequence; identical to SEQ ID NO: 2453
  Synthetic

SEQ ID NO: 2701 - RNA, 42 nt, Artificial Sequence; identical to SEQ ID NO: 2453
  Synthetic

SEQ ID NO: 2702 - RNA, 42 nt, Artificial Sequence; identical to SEQ ID NO: 2453
  Synthetic

SEQ ID NO: 2703 - RNA, 42 nt, Artificial Sequence; identical to SEQ ID NO: 2453
  Synthetic

SEQ ID NO: 2704 - RNA, 42 nt, Artificial Sequence; identical to SEQ ID NO: 2453
  Synthetic

SEQ ID NO: 2705 - RNA, 42 nt, Artificial Sequence; identical to SEQ ID NO: 2453
  Synthetic

SEQ ID NO: 2706 - RNA, 42 nt, Artificial Sequence; identical to SEQ ID NO: 2453
  Synthetic

SEQ ID NO: 2707 - RNA, 42 nt, Artificial Sequence; identical to SEQ ID NO: 2453
  Synthetic

SEQ ID NO: 2708 - RNA, 42 nt, Artificial Sequence; identical to SEQ ID NO: 2453
  Synthetic

SEQ ID NO: 2709 - RNA, 42 nt, Artificial Sequence; identical to SEQ ID NO: 2453
  Synthetic

SEQ ID NO: 2710 - RNA, 42 nt, Artificial Sequence; identical to SEQ ID NO: 2453
  Synthetic

SEQ ID NO: 2711 - RNA, 42 nt, Artificial Sequence; identical to SEQ ID NO: 2453
  Synthetic

SEQ ID NO: 2712 - RNA, 42 nt, Artificial Sequence; identical to SEQ ID NO: 2453
  Synthetic

SEQ ID NO: 2713 - RNA, 42 nt, Artificial Sequence; identical to SEQ ID NO: 2453
  Synthetic

SEQ ID NO: 2714 - RNA, 42 nt, Artificial Sequence; identical to SEQ ID NO: 2453
  Synthetic

SEQ ID NO: 2715 - RNA, 42 nt, Artificial Sequence; identical to SEQ ID NO: 2453
  Synthetic

SEQ ID NO: 2716 - RNA, 42 nt, Artificial Sequence; identical to SEQ ID NO: 2453
  Synthetic

SEQ ID NO: 2717 - RNA, 42 nt, Artificial Sequence; identical to SEQ ID NO: 2453
  Synthetic

SEQ ID NO: 2718 - RNA, 42 nt, Artificial Sequence; identical to SEQ ID NO: 2453
  Synthetic

SEQ ID NO: 2719 - RNA, 42 nt, Artificial Sequence; identical to SEQ ID NO: 2453
  Synthetic

SEQ ID NO: 2720 - RNA, 42 nt, Artificial Sequence; identical to SEQ ID NO: 2453
  Synthetic

SEQ ID NO: 2721 - RNA, 42 nt, Artificial Sequence; identical to SEQ ID NO: 2453
  Synthetic

SEQ ID NO: 2722 - RNA, 42 nt, Artificial Sequence; identical to SEQ ID NO: 2453
  Synthetic

SEQ ID NO: 2723 - RNA, 42 nt, Artificial Sequence; identical to SEQ ID NO: 2453
  Synthetic

SEQ ID NO: 2724 - RNA, 42 nt, Artificial Sequence; identical to SEQ ID NO: 2453
  Synthetic

SEQ ID NO: 2725 - RNA, 42 nt, Artificial Sequence; identical to SEQ ID NO: 2453
  Synthetic

SEQ ID NO: 2726 - RNA, 42 nt, Artificial Sequence; identical to SEQ ID NO: 2453
  Synthetic

SEQ ID NO: 2727 - RNA, 42 nt, Artificial Sequence; identical to SEQ ID NO: 2453
  Synthetic

SEQ ID NO: 2728 - RNA, 42 nt, Artificial Sequence; identical to SEQ ID NO: 2453
  Synthetic

SEQ ID NO: 2729 - RNA, 42 nt, Artificial Sequence; identical to SEQ ID NO: 2453
  Synthetic

SEQ ID NO: 2730 - RNA, 42 nt, Artificial Sequence; identical to SEQ ID NO: 2453
  Synthetic

SEQ ID NO: 2731 - RNA, 42 nt, Artificial Sequence; identical to SEQ ID NO: 2453
  Synthetic

SEQ ID NO: 2732 - RNA, 42 nt, Artificial Sequence; identical to SEQ ID NO: 2453
  Synthetic

SEQ ID NO: 2733 - RNA, 42 nt, Artificial Sequence; identical to SEQ ID NO: 2453
  Synthetic

SEQ ID NO: 2734 - RNA, 42 nt, Artificial Sequence; identical to SEQ ID NO: 2453
  Synthetic

SEQ ID NO: 2735 - RNA, 42 nt, Artificial Sequence
  Synthetic
acacaaauaccaguccagcgguuuuagagcuaugcuguuuug

SEQ ID NO: 2736 - RNA, 42 nt, Artificial Sequence; identical to SEQ ID NO: 2735
  Synthetic

SEQ ID NO: 2737 - RNA, 42 nt, Artificial Sequence; identical to SEQ ID NO: 2735
  Synthetic

SEQ ID NO: 2738 - RNA, 42 nt, Artificial Sequence; identical to SEQ ID NO: 2735
  Synthetic

SEQ ID NO: 2739 - RNA, 42 nt, Artificial Sequence; identical to SEQ ID NO: 2735
  Synthetic

SEQ ID NO: 2740 - RNA, 42 nt, Artificial Sequence; identical to SEQ ID NO: 2735
  Synthetic

SEQ ID NO: 2741 - RNA, 42 nt, Artificial Sequence; identical to SEQ ID NO: 2735
  Synthetic

SEQ ID NO: 2742 - RNA, 42 nt, Artificial Sequence; identical to SEQ ID NO: 2735
  Synthetic

SEQ ID NO: 2743 - RNA, 42 nt, Artificial Sequence; identical to SEQ ID NO: 2735
  Synthetic

SEQ ID NO: 2744 - RNA, 42 nt, Artificial Sequence; identical to SEQ ID NO: 2735
  Synthetic

SEQ ID NO: 2745 - RNA, 42 nt, Artificial Sequence; identical to SEQ ID NO: 2735
  Synthetic

SEQ ID NO: 2746 - RNA, 42 nt, Artificial Sequence; identical to SEQ ID NO: 2735
  Synthetic

SEQ ID NO: 2747 - RNA, 42 nt, Artificial Sequence; identical to SEQ ID NO: 2735
  Synthetic

SEQ ID NO: 2748 - RNA, 42 nt, Artificial Sequence; identical to SEQ ID NO: 2735
  Synthetic

SEQ ID NO: 2749 - RNA, 42 nt, Artificial Sequence; identical to SEQ ID NO: 2735
  Synthetic

SEQ ID NO: 2750 - RNA, 42 nt, Artificial Sequence; identical to SEQ ID NO: 2735
  Synthetic

SEQ ID NO: 2751 - RNA, 42 nt, Artificial Sequence; identical to SEQ ID NO: 2735
  Synthetic

SEQ ID NO: 2752 - RNA, 42 nt, Artificial Sequence; identical to SEQ ID NO: 2735
  Synthetic

SEQ ID NO: 2753 - RNA, 42 nt, Artificial Sequence; identical to SEQ ID NO: 2735
  Synthetic

SEQ ID NO: 2754 - RNA, 42 nt, Artificial Sequence; identical to SEQ ID NO: 2735
  Synthetic

SEQ ID NO: 2755 - RNA, 42 nt, Artificial Sequence; identical to SEQ ID NO: 2735
  Synthetic

SEQ ID NO: 2756 - RNA, 42 nt, Artificial Sequence; identical to SEQ ID NO: 2735
  Synthetic

SEQ ID NO: 2757 - RNA, 42 nt, Artificial Sequence; identical to SEQ ID NO: 2735
  Synthetic

SEQ ID NO: 2758 - RNA, 42 nt, Artificial Sequence; identical to SEQ ID NO: 2735
  Synthetic

SEQ ID NO: 2759 - RNA, 42 nt, Artificial Sequence; identical to SEQ ID NO: 2735
  Synthetic

SEQ ID NO: 2760 - RNA, 42 nt, Artificial Sequence; identical to SEQ ID NO: 2735
  Synthetic

SEQ ID NO: 2761 - RNA, 42 nt, Artificial Sequence; identical to SEQ ID NO: 2735
  Synthetic

SEQ ID NO: 2762 - RNA, 42 nt, Artificial Sequence; identical to SEQ ID NO: 2735
  Synthetic

SEQ ID NO: 2763 - RNA, 42 nt, Artificial Sequence; identical to SEQ ID NO: 2735
  Synthetic

SEQ ID NO: 2764 - RNA, 42 nt, Artificial Sequence; identical to SEQ ID NO: 2735
  Synthetic

SEQ ID NO: 2765 - RNA, 42 nt, Artificial Sequence; identical to SEQ ID NO: 2735
  Synthetic

SEQ ID NO: 2766 - RNA, 42 nt, Artificial Sequence; identical to SEQ ID NO: 2735
  Synthetic

SEQ ID NO: 2767 - RNA, 42 nt, Artificial Sequence; identical to SEQ ID NO: 2735
  Synthetic

SEQ ID NO: 2768 - RNA, 42 nt, Artificial Sequence; identical to SEQ ID NO: 2735
  Synthetic

SEQ ID NO: 2769 - RNA, 42 nt, Artificial Sequence; identical to SEQ ID NO: 2735
  Synthetic

SEQ ID NO: 2770 - RNA, 42 nt, Artificial Sequence; identical to SEQ ID NO: 2735
  Synthetic

SEQ ID NO: 2771 - RNA, 42 nt, Artificial Sequence; identical to SEQ ID NO: 2735
  Synthetic

SEQ ID NO: 2772 - RNA, 42 nt, Artificial Sequence; identical to SEQ ID NO: 2735
  Synthetic

SEQ ID NO: 2773 - RNA, 42 nt, Artificial Sequence; identical to SEQ ID NO: 2735
  Synthetic

SEQ ID NO: 2774 - RNA, 42 nt, Artificial Sequence; identical to SEQ ID NO: 2735
  Synthetic

SEQ ID NO: 2775 - RNA, 42 nt, Artificial Sequence; identical to SEQ ID NO: 2735
  Synthetic

SEQ ID NO: 2776 - RNA, 42 nt, Artificial Sequence; identical to SEQ ID NO: 2735
  Synthetic

SEQ ID NO: 2777 - RNA, 42 nt, Artificial Sequence; identical to SEQ ID NO: 2735
  Synthetic

SEQ ID NO: 2778 - RNA, 42 nt, Artificial Sequence; identical to SEQ ID NO: 2735
  Synthetic

SEQ ID NO: 2779 - RNA, 42 nt, Artificial Sequence; identical to SEQ ID NO: 2735
  Synthetic

SEQ ID NO: 2780 - RNA, 42 nt, Artificial Sequence; identical to SEQ ID NO: 2735
  Synthetic

SEQ ID NO: 2781 - RNA, 42 nt, Artificial Sequence; identical to SEQ ID NO: 2735
  Synthetic

SEQ ID NO: 2782 - RNA, 42 nt, Artificial Sequence; identical to SEQ ID NO: 2735
  Synthetic

SEQ ID NO: 2783 - RNA, 42 nt, Artificial Sequence; identical to SEQ ID NO: 2735
  Synthetic

SEQ ID NO: 2784 - RNA, 42 nt, Artificial Sequence; identical to SEQ ID NO: 2735
  Synthetic

SEQ ID NO: 2785 - RNA, 42 nt, Artificial Sequence; identical to SEQ ID NO: 2735
  Synthetic

SEQ ID NO: 2786 - RNA, 42 nt, Artificial Sequence; identical to SEQ ID NO: 2735
  Synthetic

SEQ ID NO: 2787 - RNA, 42 nt, Artificial Sequence; identical to SEQ ID NO: 2735
  Synthetic

SEQ ID NO: 2788 - RNA, 42 nt, Artificial Sequence; identical to SEQ ID NO: 2735
  Synthetic

SEQ ID NO: 2789 - RNA, 42 nt, Artificial Sequence; identical to SEQ ID NO: 2735
  Synthetic

SEQ ID NO: 2790 - RNA, 42 nt, Artificial Sequence; identical to SEQ ID NO: 2735
  Synthetic

SEQ ID NO: 2791 - RNA, 42 nt, Artificial Sequence; identical to SEQ ID NO: 2735
  Synthetic

SEQ ID NO: 2792 - RNA, 42 nt, Artificial Sequence; identical to SEQ ID NO: 2735
  Synthetic

SEQ ID NO: 2793 - RNA, 42 nt, Artificial Sequence; identical to SEQ ID NO: 2735
  Synthetic

SEQ ID NO: 2794 - RNA, 42 nt, Artificial Sequence; identical to SEQ ID NO: 2735
  Synthetic

SEQ ID NO: 2795 - RNA, 42 nt, Artificial Sequence; identical to SEQ ID NO: 2735
  Synthetic

SEQ ID NO: 2796 - RNA, 42 nt, Artificial Sequence; identical to SEQ ID NO: 2735
  Synthetic

SEQ ID NO: 2797 - RNA, 42 nt, Artificial Sequence; identical to SEQ ID NO: 2735
  Synthetic

SEQ ID NO: 2798 - RNA, 42 nt, Artificial Sequence; identical to SEQ ID NO: 2735
  Synthetic

SEQ ID NO: 2799 - RNA, 42 nt, Artificial Sequence; identical to SEQ ID NO: 2735
  Synthetic

SEQ ID NO: 2800 - RNA, 42 nt, Artificial Sequence; identical to SEQ ID NO: 2735
  Synthetic

SEQ ID NO: 2801 - RNA, 42 nt, Artificial Sequence; identical to SEQ ID NO: 2735
  Synthetic

SEQ ID NO: 2802 - RNA, 42 nt, Artificial Sequence; identical to SEQ ID NO: 2735
  Synthetic

SEQ ID NO: 2803 - RNA, 42 nt, Artificial Sequence; identical to SEQ ID NO: 2735
  Synthetic

SEQ ID NO: 2804 - RNA, 42 nt, Artificial Sequence; identical to SEQ ID NO: 2735
  Synthetic

SEQ ID NO: 2805 - RNA, 42 nt, Artificial Sequence; identical to SEQ ID NO: 2735
  Synthetic

SEQ ID NO: 2806 - RNA, 42 nt, Artificial Sequence; identical to SEQ ID NO: 2735
  Synthetic

SEQ ID NO: 2807 - RNA, 42 nt, Artificial Sequence; identical to SEQ ID NO: 2735
  Synthetic

SEQ ID NO: 2808 - RNA, 42 nt, Artificial Sequence; identical to SEQ ID NO: 2735
  Synthetic

SEQ ID NO: 2809 - RNA, 42 nt, Artificial Sequence; identical to SEQ ID NO: 2735
  Synthetic

SEQ ID NO: 2810 - RNA, 42 nt, Artificial Sequence; identical to SEQ ID NO: 2735
  Synthetic

SEQ ID NO: 2811 - RNA, 42 nt, Artificial Sequence; identical to SEQ ID NO: 2735
  Synthetic

SEQ ID NO: 2812 - RNA, 42 nt, Artificial Sequence; identical to SEQ ID NO: 2735
  Synthetic

SEQ ID NO: 2813 - RNA, 42 nt, Artificial Sequence; identical to SEQ ID NO: 2735
  Synthetic

SEQ ID NO: 2814 - RNA, 42 nt, Artificial Sequence; identical to SEQ ID NO: 2735
  Synthetic

SEQ ID NO: 2815 - RNA, 42 nt, Artificial Sequence; identical to SEQ ID NO: 2735
  Synthetic

SEQ ID NO: 2816 - RNA, 42 nt, Artificial Sequence; identical to SEQ ID NO: 2735
  Synthetic

SEQ ID NO: 2817 - RNA, 42 nt, Artificial Sequence; identical to SEQ ID NO: 2735
  Synthetic

SEQ ID NO: 2818 - RNA, 42 nt, Artificial Sequence; identical to SEQ ID NO: 2735
  Synthetic

SEQ ID NO: 2819 - RNA, 42 nt, Artificial Sequence; identical to SEQ ID NO: 2735
  Synthetic

SEQ ID NO: 2820 - RNA, 42 nt, Artificial Sequence; identical to SEQ ID NO: 2735
  Synthetic

SEQ ID NO: 2821 - RNA, 42 nt, Artificial Sequence; identical to SEQ ID NO: 2735
  Synthetic

SEQ ID NO: 2822 - RNA, 42 nt, Artificial Sequence; identical to SEQ ID NO: 2735
  Synthetic

SEQ ID NO: 2823 - RNA, 42 nt, Artificial Sequence; identical to SEQ ID NO: 2735
  Synthetic

SEQ ID NO: 2824 - RNA, 42 nt, Artificial Sequence; identical to SEQ ID NO: 2735
  Synthetic

SEQ ID NO: 2825 - RNA, 42 nt, Artificial Sequence; identical to SEQ ID NO: 2735
  Synthetic

SEQ ID NO: 2826 - RNA, 42 nt, Artificial Sequence; identical to SEQ ID NO: 2735
  Synthetic

SEQ ID NO: 2827 - RNA, 42 nt, Artificial Sequence; identical to SEQ ID NO: 2735
  Synthetic

SEQ ID NO: 2828 - RNA, 42 nt, Artificial Sequence; identical to SEQ ID NO: 2735
  Synthetic

SEQ ID NO: 2829 - RNA, 42 nt, Artificial Sequence; identical to SEQ ID NO: 2735
  Synthetic

SEQ ID NO: 2830 - RNA, 42 nt, Artificial Sequence; identical to SEQ ID NO: 2735
  Synthetic

SEQ ID NO: 2831 - RNA, 42 nt, Artificial Sequence; identical to SEQ ID NO: 2735
  Synthetic

SEQ ID NO: 2832 - RNA, 42 nt, Artificial Sequence; identical to SEQ ID NO: 2735
  Synthetic

SEQ ID NO: 2833 - RNA, 42 nt, Artificial Sequence; identical to SEQ ID NO: 2735
  Synthetic

SEQ ID NO: 2834 - RNA, 42 nt, Artificial Sequence; identical to SEQ ID NO: 2735
  Synthetic

SEQ ID NO: 2835 - RNA, 42 nt, Artificial Sequence; identical to SEQ ID NO: 2735
  Synthetic

SEQ ID NO: 2836 - RNA, 42 nt, Artificial Sequence; identical to SEQ ID NO: 2735
  Synthetic

SEQ ID NO: 2837 - RNA, 42 nt, Artificial Sequence; identical to SEQ ID NO: 2735
  Synthetic

SEQ ID NO: 2838 - RNA, 42 nt, Artificial Sequence; identical to SEQ ID NO: 2735
  Synthetic

SEQ ID NO: 2839 - RNA, 42 nt, Artificial Sequence; identical to SEQ ID NO: 2735
  Synthetic

SEQ ID NO: 2840 - RNA, 42 nt, Artificial Sequence; identical to SEQ ID NO: 2735
  Synthetic

SEQ ID NO: 2841 - RNA, 42 nt, Artificial Sequence; identical to SEQ ID NO: 2735
  Synthetic

SEQ ID NO: 2842 - RNA, 42 nt, Artificial Sequence; identical to SEQ ID NO: 2735
  Synthetic

SEQ ID NO: 2843 - RNA, 42 nt, Artificial Sequence; identical to SEQ ID NO: 2735
  Synthetic

SEQ ID NO: 2844 - RNA, 42 nt, Artificial Sequence; identical to SEQ ID NO: 2735
  Synthetic

SEQ ID NO: 2845 - RNA, 42 nt, Artificial Sequence; identical to SEQ ID NO: 2735
  Synthetic

SEQ ID NO: 2846 - RNA, 42 nt, Artificial Sequence; identical to SEQ ID NO: 2735
  Synthetic

SEQ ID NO: 2847 - RNA, 42 nt, Artificial Sequence; identical to SEQ ID NO: 2735
  Synthetic

SEQ ID NO: 2848 - RNA, 42 nt, Artificial Sequence; identical to SEQ ID NO: 2735
  Synthetic

SEQ ID NO: 2849 - RNA, 42 nt, Artificial Sequence; identical to SEQ ID NO: 2735
  Synthetic

SEQ ID NO: 2850 - RNA, 42 nt, Artificial Sequence; identical to SEQ ID NO: 2735
  Synthetic

SEQ ID NO: 2851 - RNA, 42 nt, Artificial Sequence; identical to SEQ ID NO: 2735
  Synthetic

SEQ ID NO: 2852 - RNA, 42 nt, Artificial Sequence; identical to SEQ ID NO: 2735
  Synthetic

SEQ ID NO: 2853 - RNA, 42 nt, Artificial Sequence; identical to SEQ ID NO: 2735
  Synthetic

SEQ ID NO: 2854 - RNA, 42 nt, Artificial Sequence; identical to SEQ ID NO: 2735
  Synthetic

SEQ ID NO: 2855 - RNA, 42 nt, Artificial Sequence; identical to SEQ ID NO: 2735
  Synthetic

SEQ ID NO: 2856 - RNA, 42 nt, Artificial Sequence; identical to SEQ ID NO: 2735
  Synthetic

SEQ ID NO: 2857 - RNA, 42 nt, Artificial Sequence; identical to SEQ ID NO: 2735
  Synthetic

SEQ ID NO: 2858 - RNA, 42 nt, Artificial Sequence; identical to SEQ ID NO: 2735
  Synthetic

SEQ ID NO: 2859 - RNA, 42 nt, Artificial Sequence; identical to SEQ ID NO: 2735
  Synthetic

SEQ ID NO: 2860 - RNA, 42 nt, Artificial Sequence; identical to SEQ ID NO: 2735
  Synthetic

SEQ ID NO: 2861 - RNA, 42 nt, Artificial Sequence; identical to SEQ ID NO: 2735
  Synthetic

SEQ ID NO: 2862 - RNA, 42 nt, Artificial Sequence; identical to SEQ ID NO: 2735
  Synthetic

SEQ ID NO: 2863 - RNA, 42 nt, Artificial Sequence; identical to SEQ ID NO: 2735
  Synthetic

SEQ ID NO: 2864 - RNA, 42 nt, Artificial Sequence; identical to SEQ ID NO: 2735
  Synthetic

SEQ ID NO: 2865 - RNA, 42 nt, Artificial Sequence; identical to SEQ ID NO: 2735
  Synthetic

SEQ ID NO: 2866 - RNA, 42 nt, Artificial Sequence; identical to SEQ ID NO: 2735
  Synthetic

SEQ ID NO: 2867 - RNA, 42 nt, Artificial Sequence; identical to SEQ ID NO: 2735
  Synthetic

SEQ ID NO: 2868 - RNA, 42 nt, Artificial Sequence; identical to SEQ ID NO: 2735
  Synthetic

SEQ ID NO: 2869 - RNA, 42 nt, Artificial Sequence; identical to SEQ ID NO: 2735
  Synthetic

SEQ ID NO: 2870 - RNA, 42 nt, Artificial Sequence; identical to SEQ ID NO: 2735
  Synthetic

SEQ ID NO: 2871 - RNA, 42 nt, Artificial Sequence; identical to SEQ ID NO: 2735
  Synthetic

SEQ ID NO: 2872 - RNA, 42 nt, Artificial Sequence; identical to SEQ ID NO: 2735
  Synthetic

SEQ ID NO: 2873 - RNA, 42 nt, Artificial Sequence; identical to SEQ ID NO: 2735
  Synthetic

SEQ ID NO: 2874 - RNA, 42 nt, Artificial Sequence; identical to SEQ ID NO: 2735
  Synthetic

SEQ ID NO: 2875 - RNA, 42 nt, Artificial Sequence; identical to SEQ ID NO: 2735
  Synthetic

SEQ ID NO: 2876 - RNA, 42 nt, Artificial Sequence; identical to SEQ ID NO: 2735
  Synthetic

SEQ ID NO: 2877 - RNA, 42 nt, Artificial Sequence; identical to SEQ ID NO: 2735
  Synthetic

SEQ ID NO: 2878 - RNA, 42 nt, Artificial Sequence; identical to SEQ ID NO: 2735
  Synthetic

SEQ ID NO: 2879 - RNA, 42 nt, Artificial Sequence; identical to SEQ ID NO: 2735
  Synthetic

SEQ ID NO: 2880 - RNA, 42 nt, Artificial Sequence; identical to SEQ ID NO: 2735
  Synthetic

SEQ ID NO: 2881 - RNA, 42 nt, Artificial Sequence; identical to SEQ ID NO: 2735
  Synthetic

SEQ ID NO: 2882 - RNA, 42 nt, Artificial Sequence; identical to SEQ ID NO: 2735
  Synthetic

SEQ ID NO: 2883 - RNA, 42 nt, Artificial Sequence; identical to SEQ ID NO: 2735
  Synthetic

SEQ ID NO: 2884 - RNA, 42 nt, Artificial Sequence; identical to SEQ ID NO: 2735
  Synthetic

SEQ ID NO: 2885 - RNA, 42 nt, Artificial Sequence; identical to SEQ ID NO: 2735
  Synthetic

SEQ ID NO: 2886 - RNA, 42 nt, Artificial Sequence; identical to SEQ ID NO: 2735
  Synthetic

SEQ ID NO: 2887 - RNA, 42 nt, Artificial Sequence; identical to SEQ ID NO: 2735
  Synthetic

SEQ ID NO: 2888 - RNA, 42 nt, Artificial Sequence; identical to SEQ ID NO: 2735
  Synthetic

SEQ ID NO: 2889 - RNA, 42 nt, Artificial Sequence; identical to SEQ ID NO: 2735
  Synthetic

SEQ ID NO: 2890 - RNA, 42 nt, Artificial Sequence; identical to SEQ ID NO: 2735
  Synthetic

SEQ ID NO: 2891 - RNA, 42 nt, Artificial Sequence; identical to SEQ ID NO: 2735
  Synthetic

SEQ ID NO: 2892 - RNA, 42 nt, Artificial Sequence; identical to SEQ ID NO: 2735
  Synthetic

SEQ ID NO: 2893 - RNA, 42 nt, Artificial Sequence; identical to SEQ ID NO: 2735
  Synthetic

SEQ ID NO: 2894 - RNA, 42 nt, Artificial Sequence; identical to SEQ ID NO: 2735
  Synthetic

SEQ ID NO: 2895 - RNA, 42 nt, Artificial Sequence; identical to SEQ ID NO: 2735
  Synthetic

SEQ ID NO: 2896 - RNA, 42 nt, Artificial Sequence; identical to SEQ ID NO: 2735
  Synthetic

SEQ ID NO: 2897 - RNA, 42 nt, Artificial Sequence; identical to SEQ ID NO: 2735
  Synthetic

SEQ ID NO: 2898 - RNA, 42 nt, Artificial Sequence; identical to SEQ ID NO: 2735
  Synthetic

SEQ ID NO: 2899 - RNA, 42 nt, Artificial Sequence; identical to SEQ ID NO: 2735
  Synthetic

SEQ ID NO: 2900 - RNA, 42 nt, Artificial Sequence; identical to SEQ ID NO: 2735
  Synthetic

SEQ ID NO: 2901 - RNA, 42 nt, Artificial Sequence; identical to SEQ ID NO: 2735
  Synthetic

SEQ ID NO: 2902 - RNA, 42 nt, Artificial Sequence; identical to SEQ ID NO: 2735
  Synthetic

SEQ ID NO: 2903 - RNA, 42 nt, Artificial Sequence; identical to SEQ ID NO: 2735
  Synthetic

SEQ ID NO: 2904 - RNA, 42 nt, Artificial Sequence; identical to SEQ ID NO: 2735
  Synthetic

SEQ ID NO: 2905 - RNA, 42 nt, Artificial Sequence; identical to SEQ ID NO: 2735
  Synthetic

SEQ ID NO: 2906 - RNA, 42 nt, Artificial Sequence; identical to SEQ ID NO: 2735
  Synthetic

SEQ ID NO: 2907 - RNA, 42 nt, Artificial Sequence; identical to SEQ ID NO: 2735
  Synthetic

SEQ ID NO: 2908 - RNA, 42 nt, Artificial Sequence; identical to SEQ ID NO: 2735
  Synthetic

SEQ ID NO: 2909 - RNA, 42 nt, Artificial Sequence; identical to SEQ ID NO: 2735
  Synthetic

SEQ ID NO: 2910 - RNA, 42 nt, Artificial Sequence; identical to SEQ ID NO: 2735
  Synthetic

SEQ ID NO: 2911 - RNA, 42 nt, Artificial Sequence; identical to SEQ ID NO: 2735
  Synthetic

SEQ ID NO: 2912 - RNA, 42 nt, Artificial Sequence; identical to SEQ ID NO: 2735
  Synthetic

SEQ ID NO: 2913 - RNA, 42 nt, Artificial Sequence; identical to SEQ ID NO: 2735
  Synthetic

SEQ ID NO: 2914 - RNA, 42 nt, Artificial Sequence; identical to SEQ ID NO: 2735
  Synthetic

SEQ ID NO: 2915 - RNA, 42 nt, Artificial Sequence; identical to SEQ ID NO: 2735
  Synthetic

SEQ ID NO: 2916 - RNA, 42 nt, Artificial Sequence; identical to SEQ ID NO: 2735
  Synthetic

SEQ ID NO: 2917 - RNA, 42 nt, Artificial Sequence; identical to SEQ ID NO: 2735
  Synthetic

SEQ ID NO: 2918 - RNA, 42 nt, Artificial Sequence; identical to SEQ ID NO: 2735
  Synthetic

SEQ ID NO: 2919 - RNA, 42 nt, Artificial Sequence; identical to SEQ ID NO: 2735
  Synthetic

SEQ ID NO: 2920 - RNA, 42 nt, Artificial Sequence; identical to SEQ ID NO: 2735
  Synthetic

SEQ ID NO: 2921 - RNA, 42 nt, Artificial Sequence; identical to SEQ ID NO: 2735
  Synthetic

SEQ ID NO: 2922 - RNA, 42 nt, Artificial Sequence; identical to SEQ ID NO: 2735
  Synthetic

SEQ ID NO: 2923 - RNA, 42 nt, Artificial Sequence; identical to SEQ ID NO: 2735
  Synthetic

SEQ ID NO: 2924 - RNA, 42 nt, Artificial Sequence; identical to SEQ ID NO: 2735
  Synthetic

SEQ ID NO: 2925 - RNA, 42 nt, Artificial Sequence; identical to SEQ ID NO: 2735
  Synthetic

SEQ ID NO: 2926 - RNA, 42 nt, Artificial Sequence; identical to SEQ ID NO: 2735
  Synthetic

SEQ ID NO: 2927 - RNA, 42 nt, Artificial Sequence; identical to SEQ ID NO: 2735
  Synthetic

SEQ ID NO: 2928 - RNA, 42 nt, Artificial Sequence; identical to SEQ ID NO: 2735
  Synthetic

SEQ ID NO: 2929 - RNA, 42 nt, Artificial Sequence; identical to SEQ ID NO: 2735
  Synthetic

SEQ ID NO: 2930 - RNA, 42 nt, Artificial Sequence; identical to SEQ ID NO: 2735
  Synthetic

SEQ ID NO: 2931 - RNA, 42 nt, Artificial Sequence; identical to SEQ ID NO: 2735
  Synthetic

SEQ ID NO: 2932 - RNA, 42 nt, Artificial Sequence; identical to SEQ ID NO: 2735
  Synthetic

SEQ ID NO: 2933 - RNA, 42 nt, Artificial Sequence; identical to SEQ ID NO: 2735
  Synthetic

SEQ ID NO: 2934 - RNA, 42 nt, Artificial Sequence; identical to SEQ ID NO: 2735
  Synthetic

SEQ ID NO: 2935 - RNA, 42 nt, Artificial Sequence; identical to SEQ ID NO: 2735
  Synthetic

SEQ ID NO: 2936 - RNA, 42 nt, Artificial Sequence; identical to SEQ ID NO: 2735
  Synthetic

SEQ ID NO: 2937 - RNA, 42 nt, Artificial Sequence; identical to SEQ ID NO: 2735
  Synthetic

SEQ ID NO: 2938 - RNA, 42 nt, Artificial Sequence; identical to SEQ ID NO: 2735
  Synthetic

SEQ ID NO: 2939 - RNA, 42 nt, Artificial Sequence; identical to SEQ ID NO: 2735
  Synthetic

SEQ ID NO: 2940 - RNA, 42 nt, Artificial Sequence; identical to SEQ ID NO: 2735
  Synthetic

SEQ ID NO: 2941 - RNA, 42 nt, Artificial Sequence; identical to SEQ ID NO: 2735
  Synthetic

SEQ ID NO: 2942 - RNA, 42 nt, Artificial Sequence; identical to SEQ ID NO: 2735
  Synthetic

SEQ ID NO: 2943 - RNA, 42 nt, Artificial Sequence; identical to SEQ ID NO: 2735
  Synthetic

SEQ ID NO: 2944 - RNA, 42 nt, Artificial Sequence; identical to SEQ ID NO: 2735
  Synthetic

SEQ ID NO: 2945 - RNA, 42 nt, Artificial Sequence; identical to SEQ ID NO: 2735
  Synthetic

SEQ ID NO: 2946 - RNA, 42 nt, Artificial Sequence; identical to SEQ ID NO: 2735
  Synthetic

SEQ ID NO: 2947 - RNA, 42 nt, Artificial Sequence; identical to SEQ ID NO: 2735
  Synthetic

SEQ ID NO: 2948 - RNA, 42 nt, Artificial Sequence; identical to SEQ ID NO: 2735
  Synthetic

SEQ ID NO: 2949 - RNA, 42 nt, Artificial Sequence; identical to SEQ ID NO: 2735
  Synthetic

SEQ ID NO: 2950 - RNA, 42 nt, Artificial Sequence; identical to SEQ ID NO: 2735
  Synthetic

SEQ ID NO: 2951 - RNA, 42 nt, Artificial Sequence; identical to SEQ ID NO: 2735
  Synthetic

SEQ ID NO: 2952 - RNA, 42 nt, Artificial Sequence; identical to SEQ ID NO: 2735
  Synthetic

SEQ ID NO: 2953 - RNA, 42 nt, Artificial Sequence; identical to SEQ ID NO: 2735
  Synthetic

SEQ ID NO: 2954 - RNA, 42 nt, Artificial Sequence; identical to SEQ ID NO: 2735
  Synthetic

SEQ ID NO: 2955 - RNA, 42 nt, Artificial Sequence; identical to SEQ ID NO: 2735
  Synthetic

SEQ ID NO: 2956 - RNA, 42 nt, Artificial Sequence; identical to SEQ ID NO: 2735
  Synthetic

SEQ ID NO: 2957 - RNA, 42 nt, Artificial Sequence; identical to SEQ ID NO: 2735
  Synthetic

SEQ ID NO: 2958 - RNA, 42 nt, Artificial Sequence; identical to SEQ ID NO: 2735
  Synthetic

SEQ ID NO: 2959 - RNA, 42 nt, Artificial Sequence; identical to SEQ ID NO: 2735
  Synthetic

SEQ ID NO: 2960 - RNA, 42 nt, Artificial Sequence; identical to SEQ ID NO: 2735
  Synthetic

SEQ ID NO: 2961 - RNA, 42 nt, Artificial Sequence; identical to SEQ ID NO: 2735
  Synthetic

SEQ ID NO: 2962 - RNA, 42 nt, Artificial Sequence; identical to SEQ ID NO: 2735
  Synthetic

SEQ ID NO: 2963 - RNA, 42 nt, Artificial Sequence; identical to SEQ ID NO: 2735
  Synthetic

SEQ ID NO: 2964 - RNA, 42 nt, Artificial Sequence; identical to SEQ ID NO: 2735
  Synthetic

SEQ ID NO: 2965 - RNA, 42 nt, Artificial Sequence; identical to SEQ ID NO: 2735
  Synthetic

SEQ ID NO: 2966 - RNA, 42 nt, Artificial Sequence; identical to SEQ ID NO: 2735
  Synthetic

SEQ ID NO: 2967 - RNA, 42 nt, Artificial Sequence; identical to SEQ ID NO: 2735
  Synthetic

SEQ ID NO: 2968 - RNA, 42 nt, Artificial Sequence; identical to SEQ ID NO: 2735
  Synthetic

SEQ ID NO: 2969 - RNA, 42 nt, Artificial Sequence; identical to SEQ ID NO: 2735
  Synthetic

SEQ ID NO: 2970 - RNA, 42 nt, Artificial Sequence; identical to SEQ ID NO: 2735
  Synthetic

SEQ ID NO: 2971 - RNA, 42 nt, Artificial Sequence; identical to SEQ ID NO: 2735
  Synthetic

SEQ ID NO: 2972 - RNA, 42 nt, Artificial Sequence; identical to SEQ ID NO: 2735
  Synthetic

SEQ ID NO: 2973 - RNA, 42 nt, Artificial Sequence; identical to SEQ ID NO: 2735
  Synthetic

SEQ ID NO: 2974 - RNA, 42 nt, Artificial Sequence; identical to SEQ ID NO: 2735
  Synthetic

SEQ ID NO: 2975 - RNA, 42 nt, Artificial Sequence; identical to SEQ ID NO: 2735
  Synthetic

SEQ ID NO: 2976 - RNA, 42 nt, Artificial Sequence; identical to SEQ ID NO: 2735
  Synthetic

SEQ ID NO: 2977 - RNA, 42 nt, Artificial Sequence; identical to SEQ ID NO: 2735
  Synthetic

SEQ ID NO: 2978 - RNA, 42 nt, Artificial Sequence; identical to SEQ ID NO: 2735
  Synthetic

SEQ ID NO: 2979 - RNA, 42 nt, Artificial Sequence; identical to SEQ ID NO: 2735
  Synthetic

SEQ ID NO: 2980 - RNA, 42 nt, Artificial Sequence; identical to SEQ ID NO: 2735
  Synthetic

SEQ ID NO: 2981 - RNA, 42 nt, Artificial Sequence; identical to SEQ ID NO: 2735
  Synthetic

SEQ ID NO: 2982 - RNA, 42 nt, Artificial Sequence; identical to SEQ ID NO: 2735
  Synthetic

SEQ ID NO: 2983 - RNA, 42 nt, Artificial Sequence; identical to SEQ ID NO: 2735
  Synthetic

SEQ ID NO: 2984 - RNA, 42 nt, Artificial Sequence; identical to SEQ ID NO: 2735
  Synthetic

SEQ ID NO: 2985 - RNA, 42 nt, Artificial Sequence; identical to SEQ ID NO: 2735
  Synthetic

SEQ ID NO: 2986 - RNA, 42 nt, Artificial Sequence; identical to SEQ ID NO: 2735
  Synthetic

SEQ ID NO: 2987 - RNA, 42 nt, Artificial Sequence; identical to SEQ ID NO: 2735
  Synthetic

SEQ ID NO: 2988 - RNA, 42 nt, Artificial Sequence; identical to SEQ ID NO: 2735
  Synthetic

SEQ ID NO: 2989 - RNA, 42 nt, Artificial Sequence; identical to SEQ ID NO: 2735
  Synthetic

SEQ ID NO: 2990 - RNA, 42 nt, Artificial Sequence; identical to SEQ ID NO: 2735
  Synthetic

SEQ ID NO: 2991 - RNA, 42 nt, Artificial Sequence; identical to SEQ ID NO: 2735
  Synthetic

SEQ ID NO: 2992 - RNA, 42 nt, Artificial Sequence; identical to SEQ ID NO: 2735
  Synthetic

SEQ ID NO: 2993 - RNA, 42 nt, Artificial Sequence; identical to SEQ ID NO: 2735
  Synthetic

SEQ ID NO: 2994 - RNA, 42 nt, Artificial Sequence; identical to SEQ ID NO: 2735
  Synthetic

SEQ ID NO: 2995 - RNA, 42 nt, Artificial Sequence; identical to SEQ ID NO: 2735
  Synthetic

SEQ ID NO: 2996 - RNA, 42 nt, Artificial Sequence; identical to SEQ ID NO: 2735
  Synthetic

SEQ ID NO: 2997 - RNA, 42 nt, Artificial Sequence; identical to SEQ ID NO: 2735
  Synthetic

SEQ ID NO: 2998 - RNA, 42 nt, Artificial Sequence; identical to SEQ ID NO: 2735
  Synthetic

SEQ ID NO: 2999 - RNA, 42 nt, Artificial Sequence; identical to SEQ ID NO: 2735
  Synthetic

SEQ ID NO: 3000 - RNA, 42 nt, Artificial Sequence; identical to SEQ ID NO: 2735
  Synthetic

SEQ ID NO: 3001 - RNA, 42 nt, Artificial Sequence; identical to SEQ ID NO: 2735
  Synthetic

SEQ ID NO: 3002 - RNA, 42 nt, Artificial Sequence; identical to SEQ ID NO: 2735
  Synthetic

SEQ ID NO: 3003 - RNA, 42 nt, Artificial Sequence; identical to SEQ ID NO: 2735
  Synthetic

SEQ ID NO: 3004 - RNA, 42 nt, Artificial Sequence; identical to SEQ ID NO: 2735
  Synthetic

SEQ ID NO: 3005 - RNA, 42 nt, Artificial Sequence; identical to SEQ ID NO: 2735
  Synthetic

SEQ ID NO: 3006 - RNA, 42 nt, Artificial Sequence; identical to SEQ ID NO: 2735
  Synthetic

SEQ ID NO: 3007 - RNA, 42 nt, Artificial Sequence; identical to SEQ ID NO: 2735
  Synthetic

SEQ ID NO: 3008 - RNA, 42 nt, Artificial Sequence; identical to SEQ ID NO: 2735
  Synthetic

SEQ ID NO: 3009 - RNA, 42 nt, Artificial Sequence; identical to SEQ ID NO: 2735
  Synthetic

SEQ ID NO: 3010 - RNA, 42 nt, Artificial Sequence; identical to SEQ ID NO: 2735
  Synthetic

SEQ ID NO: 3011 - RNA, 42 nt, Artificial Sequence; identical to SEQ ID NO: 2735
  Synthetic

SEQ ID NO: 3012 - RNA, 42 nt, Artificial Sequence; identical to SEQ ID NO: 2735
  Synthetic

SEQ ID NO: 3013 - RNA, 42 nt, Artificial Sequence; identical to SEQ ID NO: 2735
  Synthetic

SEQ ID NO: 3014 - RNA, 42 nt, Artificial Sequence; identical to SEQ ID NO: 2735
  Synthetic

SEQ ID NO: 3015 - RNA, 42 nt, Artificial Sequence; identical to SEQ ID NO: 2735
  Synthetic

SEQ ID NO: 3016 - RNA, 42 nt, Artificial Sequence; identical to SEQ ID NO: 2735
  Synthetic

SEQ ID NO: 3017 - RNA, 42 nt, Artificial Sequence; identical to SEQ ID NO: 2735
  Synthetic

SEQ ID NO: 3018 - RNA, 100 nt, Artificial Sequence; identical to SEQ ID NO: 404
  Synthetic

SEQ ID NO: 3019 - RNA, 100 nt, Artificial Sequence; identical to SEQ ID NO: 404
  Synthetic

SEQ ID NO: 3020 - RNA, 100 nt, Artificial Sequence; identical to SEQ ID NO: 404
  Synthetic

SEQ ID NO: 3021 - RNA, 100 nt, Artificial Sequence; identical to SEQ ID NO: 404
  Synthetic

SEQ ID NO: 3022 - RNA, 100 nt, Artificial Sequence; identical to SEQ ID NO: 404
  Synthetic

SEQ ID NO: 3023 - RNA, 100 nt, Artificial Sequence; identical to SEQ ID NO: 404
  Synthetic

SEQ ID NO: 3024 - RNA, 100 nt, Artificial Sequence; identical to SEQ ID NO: 404
  Synthetic

SEQ ID NO: 3025 - RNA, 100 nt, Artificial Sequence; identical to SEQ ID NO: 404
  Synthetic

SEQ ID NO: 3026 - RNA, 100 nt, Artificial Sequence; identical to SEQ ID NO: 404
  Synthetic

SEQ ID NO: 3027 - RNA, 100 nt, Artificial Sequence; identical to SEQ ID NO: 404
  Synthetic

SEQ ID NO: 3028 - RNA, 100 nt, Artificial Sequence; identical to SEQ ID NO: 404
  Synthetic

SEQ ID NO: 3029 - RNA, 100 nt, Artificial Sequence; identical to SEQ ID NO: 404
  Synthetic

SEQ ID NO: 3030 - RNA, 100 nt, Artificial Sequence; identical to SEQ ID NO: 404
  Synthetic

SEQ ID NO: 3031 - RNA, 100 nt, Artificial Sequence; identical to SEQ ID NO: 404
  Synthetic

SEQ ID NO: 3032 - RNA, 100 nt, Artificial Sequence; identical to SEQ ID NO: 404
  Synthetic

SEQ ID NO: 3033 - RNA, 100 nt, Artificial Sequence; identical to SEQ ID NO: 404
  Synthetic

SEQ ID NO: 3034 - RNA, 100 nt, Artificial Sequence; identical to SEQ ID NO: 404
  Synthetic

SEQ ID NO: 3035 - RNA, 100 nt, Artificial Sequence; identical to SEQ ID NO: 404
  Synthetic

SEQ ID NO: 3036 - RNA, 100 nt, Artificial Sequence; identical to SEQ ID NO: 404
  Synthetic

SEQ ID NO: 3037 - RNA, 100 nt, Artificial Sequence; identical to SEQ ID NO: 404
  Synthetic

SEQ ID NO: 3038 - RNA, 100 nt, Artificial Sequence; identical to SEQ ID NO: 404
  Synthetic

SEQ ID NO: 3039 - RNA, 100 nt, Artificial Sequence; identical to SEQ ID NO: 404
  Synthetic

SEQ ID NO: 3040 - RNA, 100 nt, Artificial Sequence; identical to SEQ ID NO: 404
  Synthetic

SEQ ID NO: 3041 - RNA, 100 nt, Artificial Sequence; identical to SEQ ID NO: 404
  Synthetic

SEQ ID NO: 3042 - RNA, 100 nt, Artificial Sequence; identical to SEQ ID NO: 404
  Synthetic

SEQ ID NO: 3043 - RNA, 100 nt, Artificial Sequence; identical to SEQ ID NO: 404
  Synthetic

SEQ ID NO: 3044 - RNA, 100 nt, Artificial Sequence; identical to SEQ ID NO: 404
  Synthetic

SEQ ID NO: 3045 - RNA, 100 nt, Artificial Sequence; identical to SEQ ID NO: 404
  Synthetic

SEQ ID NO: 3046 - RNA, 100 nt, Artificial Sequence; identical to SEQ ID NO: 404
  Synthetic

SEQ ID NO: 3047 - RNA, 100 nt, Artificial Sequence; identical to SEQ ID NO: 404
  Synthetic

SEQ ID NO: 3048 - RNA, 100 nt, Artificial Sequence; identical to SEQ ID NO: 404
  Synthetic

SEQ ID NO: 3049 - RNA, 100 nt, Artificial Sequence; identical to SEQ ID NO: 404
  Synthetic

SEQ ID NO: 3050 - RNA, 100 nt, Artificial Sequence; identical to SEQ ID NO: 404
  Synthetic

SEQ ID NO: 3051 - RNA, 100 nt, Artificial Sequence; identical to SEQ ID NO: 404
  Synthetic

SEQ ID NO: 3052 - RNA, 100 nt, Artificial Sequence; identical to SEQ ID NO: 404
  Synthetic

SEQ ID NO: 3053 - RNA, 100 nt, Artificial Sequence; identical to SEQ ID NO: 404
  Synthetic

SEQ ID NO: 3054 - RNA, 100 nt, Artificial Sequence; identical to SEQ ID NO: 404
  Synthetic

SEQ ID NO: 3055 - RNA, 100 nt, Artificial Sequence; identical to SEQ ID NO: 404
  Synthetic

SEQ ID NO: 3056 - RNA, 100 nt, Artificial Sequence; identical to SEQ ID NO: 404
  Synthetic

SEQ ID NO: 3057 - RNA, 100 nt, Artificial Sequence; identical to SEQ ID NO: 404
  Synthetic

SEQ ID NO: 3058 - RNA, 100 nt, Artificial Sequence; identical to SEQ ID NO: 404
  Synthetic

SEQ ID NO: 3059 - RNA, 100 nt, Artificial Sequence; identical to SEQ ID NO: 404
  Synthetic

SEQ ID NO: 3060 - RNA, 100 nt, Artificial Sequence; identical to SEQ ID NO: 404
  Synthetic

SEQ ID NO: 3061 - RNA, 100 nt, Artificial Sequence; identical to SEQ ID NO: 404
  Synthetic

SEQ ID NO: 3062 - RNA, 100 nt, Artificial Sequence; identical to SEQ ID NO: 404
  Synthetic

SEQ ID NO: 3063 - RNA, 100 nt, Artificial Sequence
  Synthetic
acacaaauaccaguccagcaguuuuagagcuagaaauagcaaguuaaaauaaggcuaguccguuaucaacuugaaaaaguggcaccgagucggugcuuuu

SEQ ID NO: 3064 - RNA, 100 nt, Artificial Sequence; identical to SEQ ID NO: 3063
  Synthetic

SEQ ID NO: 3065 - RNA, 100 nt, Artificial Sequence; identical to SEQ ID NO: 3063
  Synthetic

SEQ ID NO: 3066 - RNA, 100 nt, Artificial Sequence; identical to SEQ ID NO: 3063
  Synthetic

SEQ ID NO: 3067 - RNA, 100 nt, Artificial Sequence; identical to SEQ ID NO: 3063
  Synthetic

SEQ ID NO: 3068 - RNA, 100 nt, Artificial Sequence; identical to SEQ ID NO: 3063
  Synthetic

SEQ ID NO: 3069 - RNA, 100 nt, Artificial Sequence; identical to SEQ ID NO: 3063
  Synthetic

SEQ ID NO: 3070 - RNA, 100 nt, Artificial Sequence; identical to SEQ ID NO: 3063
  Synthetic

SEQ ID NO: 3071 - RNA, 100 nt, Artificial Sequence; identical to SEQ ID NO: 3063
  Synthetic

SEQ ID NO: 3072 - RNA, 100 nt, Artificial Sequence; identical to SEQ ID NO: 3063
  Synthetic

SEQ ID NO: 3073 - RNA, 100 nt, Artificial Sequence; identical to SEQ ID NO: 3063
  Synthetic

SEQ ID NO: 3074 - RNA, 100 nt, Artificial Sequence; identical to SEQ ID NO: 3063
  Synthetic

SEQ ID NO: 3075 - RNA, 100 nt, Artificial Sequence; identical to SEQ ID NO: 3063
  Synthetic

SEQ ID NO: 3076 - RNA, 100 nt, Artificial Sequence; identical to SEQ ID NO: 3063
  Synthetic

SEQ ID NO: 3077 - RNA, 100 nt, Artificial Sequence; identical to SEQ ID NO: 3063
  Synthetic

SEQ ID NO: 3078 - RNA, 100 nt, Artificial Sequence; identical to SEQ ID NO: 3063
  Synthetic

SEQ ID NO: 3079 - RNA, 100 nt, Artificial Sequence; identical to SEQ ID NO: 3063
  Synthetic

SEQ ID NO: 3080 - RNA, 100 nt, Artificial Sequence; identical to SEQ ID NO: 3063
  Synthetic

SEQ ID NO: 3081 - RNA, 100 nt, Artificial Sequence; identical to SEQ ID NO: 3063
  Synthetic

SEQ ID NO: 3082 - RNA, 100 nt, Artificial Sequence; identical to SEQ ID NO: 3063
  Synthetic

SEQ ID NO: 3083 - RNA, 100 nt, Artificial Sequence; identical to SEQ ID NO: 3063
  Synthetic

SEQ ID NO: 3084 - RNA, 100 nt, Artificial Sequence; identical to SEQ ID NO: 3063
  Synthetic

SEQ ID NO: 3085 - RNA, 100 nt, Artificial Sequence; identical to SEQ ID NO: 3063
  Synthetic

SEQ ID NO: 3086 - RNA, 100 nt, Artificial Sequence; identical to SEQ ID NO: 3063
  Synthetic

SEQ ID NO: 3087 - RNA, 100 nt, Artificial Sequence; identical to SEQ ID NO: 3063
  Synthetic

SEQ ID NO: 3088 - RNA, 100 nt, Artificial Sequence; identical to SEQ ID NO: 3063
  Synthetic

SEQ ID NO: 3089 - RNA, 100 nt, Artificial Sequence; identical to SEQ ID NO: 3063
  Synthetic

SEQ ID NO: 3090 - RNA, 100 nt, Artificial Sequence; identical to SEQ ID NO: 3063
  Synthetic

SEQ ID NO: 3091 - RNA, 100 nt, Artificial Sequence; identical to SEQ ID NO: 3063
  Synthetic

SEQ ID NO: 3092 - RNA, 100 nt, Artificial Sequence; identical to SEQ ID NO: 3063
  Synthetic

SEQ ID NO: 3093 - RNA, 100 nt, Artificial Sequence; identical to SEQ ID NO: 3063
  Synthetic

SEQ ID NO: 3094 - RNA, 100 nt, Artificial Sequence; identical to SEQ ID NO: 3063
  Synthetic

SEQ ID NO: 3095 - RNA, 100 nt, Artificial Sequence; identical to SEQ ID NO: 3063
  Synthetic

SEQ ID NO: 3096 - RNA, 100 nt, Artificial Sequence; identical to SEQ ID NO: 3063
  Synthetic

SEQ ID NO: 3097 - RNA, 100 nt, Artificial Sequence; identical to SEQ ID NO: 3063
  Synthetic

SEQ ID NO: 3098 - RNA, 100 nt, Artificial Sequence; identical to SEQ ID NO: 3063
  Synthetic

SEQ ID NO: 3099 - RNA, 100 nt, Artificial Sequence; identical to SEQ ID NO: 3063
  Synthetic

SEQ ID NO: 3100 - RNA, 100 nt, Artificial Sequence; identical to SEQ ID NO: 3063
  Synthetic

SEQ ID NO: 3101 - RNA, 100 nt, Artificial Sequence; identical to SEQ ID NO: 3063
  Synthetic

SEQ ID NO: 3102 - RNA, 100 nt, Artificial Sequence; identical to SEQ ID NO: 3063
  Synthetic

SEQ ID NO: 3103 - RNA, 100 nt, Artificial Sequence; identical to SEQ ID NO: 3063
  Synthetic

SEQ ID NO: 3104 - RNA, 100 nt, Artificial Sequence; identical to SEQ ID NO: 3063
  Synthetic

SEQ ID NO: 3105 - RNA, 100 nt, Artificial Sequence; identical to SEQ ID NO: 3063
  Synthetic

SEQ ID NO: 3106 - RNA, 100 nt, Artificial Sequence; identical to SEQ ID NO: 3063
  Synthetic

SEQ ID NO: 3107 - RNA, 100 nt, Artificial Sequence; identical to SEQ ID NO: 3063
  Synthetic

SEQ ID NO: 3108 - RNA, 100 nt, Artificial Sequence
  Synthetic
uguuggacuggugugccagcguuuuagagcuagaaauagcaaguuaaaauaaggcuaguccguuaucaacuugaaaaaguggcaccgagucggugcuuuu

SEQ ID NO: 3109 - RNA, 100 nt, Artificial Sequence; identical to SEQ ID NO: 3108
  Synthetic

SEQ ID NO: 3110 - RNA, 100 nt, Artificial Sequence; identical to SEQ ID NO: 3108
  Synthetic

SEQ ID NO: 3111 - RNA, 100 nt, Artificial Sequence; identical to SEQ ID NO: 3108
  Synthetic

SEQ ID NO: 3112 - RNA, 100 nt, Artificial Sequence; identical to SEQ ID NO: 3108
  Synthetic

SEQ ID NO: 3113 - RNA, 100 nt, Artificial Sequence; identical to SEQ ID NO: 3108
  Synthetic

SEQ ID NO: 3114 - RNA, 100 nt, Artificial Sequence; identical to SEQ ID NO: 3108
  Synthetic

SEQ ID NO: 3115 - RNA, 100 nt, Artificial Sequence; identical to SEQ ID NO: 3108
  Synthetic

SEQ ID NO: 3116 - RNA, 100 nt, Artificial Sequence; identical to SEQ ID NO: 3108
  Synthetic

SEQ ID NO: 3117 - RNA, 100 nt, Artificial Sequence; identical to SEQ ID NO: 3108
  Synthetic

SEQ ID NO: 3118 - RNA, 100 nt, Artificial Sequence; identical to SEQ ID NO: 3108
  Synthetic

SEQ ID NO: 3119 - RNA, 100 nt, Artificial Sequence; identical to SEQ ID NO: 3108
  Synthetic

SEQ ID NO: 3120 - RNA, 100 nt, Artificial Sequence; identical to SEQ ID NO: 3108
  Synthetic

SEQ ID NO: 3121 - RNA, 100 nt, Artificial Sequence; identical to SEQ ID NO: 3108
  Synthetic

SEQ ID NO: 3122 - RNA, 100 nt, Artificial Sequence; identical to SEQ ID NO: 3108
  Synthetic

SEQ ID NO: 3123 - RNA, 100 nt, Artificial Sequence; identical to SEQ ID NO: 3108
  Synthetic

SEQ ID NO: 3124 - RNA, 100 nt, Artificial Sequence; identical to SEQ ID NO: 3108
  Synthetic

SEQ ID NO: 3125 - RNA, 100 nt, Artificial Sequence; identical to SEQ ID NO: 3108
  Synthetic

SEQ ID NO: 3126 - RNA, 100 nt, Artificial Sequence; identical to SEQ ID NO: 3108
  Synthetic

SEQ ID NO: 3127 - RNA, 100 nt, Artificial Sequence; identical to SEQ ID NO: 3108
  Synthetic

SEQ ID NO: 3128 - RNA, 100 nt, Artificial Sequence; identical to SEQ ID NO: 3108
  Synthetic

SEQ ID NO: 3129 - RNA, 100 nt, Artificial Sequence; identical to SEQ ID NO: 3108
  Synthetic

SEQ ID NO: 3130 - RNA, 100 nt, Artificial Sequence; identical to SEQ ID NO: 3108
  Synthetic

SEQ ID NO: 3131 - RNA, 100 nt, Artificial Sequence; identical to SEQ ID NO: 3108
  Synthetic

SEQ ID NO: 3132 - RNA, 100 nt, Artificial Sequence; identical to SEQ ID NO: 3108
  Synthetic

SEQ ID NO: 3133 - RNA, 100 nt, Artificial Sequence; identical to SEQ ID NO: 3108
  Synthetic

SEQ ID NO: 3134 - RNA, 100 nt, Artificial Sequence; identical to SEQ ID NO: 3108
  Synthetic

SEQ ID NO: 3135 - RNA, 100 nt, Artificial Sequence; identical to SEQ ID NO: 3108
  Synthetic

SEQ ID NO: 3136 - RNA, 100 nt, Artificial Sequence; identical to SEQ ID NO: 3108
  Synthetic

SEQ ID NO: 3137 - RNA, 100 nt, Artificial Sequence; identical to SEQ ID NO: 3108
  Synthetic

SEQ ID NO: 3138 - RNA, 100 nt, Artificial Sequence; identical to SEQ ID NO: 3108
  Synthetic

SEQ ID NO: 3139 - RNA, 100 nt, Artificial Sequence; identical to SEQ ID NO: 3108
  Synthetic

SEQ ID NO: 3140 - RNA, 100 nt, Artificial Sequence; identical to SEQ ID NO: 3108
  Synthetic

SEQ ID NO: 3141 - RNA, 100 nt, Artificial Sequence; identical to SEQ ID NO: 3108
  Synthetic

SEQ ID NO: 3142 - RNA, 100 nt, Artificial Sequence; identical to SEQ ID NO: 3108
  Synthetic

SEQ ID NO: 3143 - RNA, 100 nt, Artificial Sequence; identical to SEQ ID NO: 3108
  Synthetic

SEQ ID NO: 3144 - RNA, 100 nt, Artificial Sequence; identical to SEQ ID NO: 3108
  Synthetic

SEQ ID NO: 3145 - RNA, 100 nt, Artificial Sequence; identical to SEQ ID NO: 3108
  Synthetic

SEQ ID NO: 3146 - RNA, 100 nt, Artificial Sequence; identical to SEQ ID NO: 3108
  Synthetic

SEQ ID NO: 3147 - RNA, 100 nt, Artificial Sequence; identical to SEQ ID NO: 3108
  Synthetic

SEQ ID NO: 3148 - RNA, 100 nt, Artificial Sequence; identical to SEQ ID NO: 3108
  Synthetic

SEQ ID NO: 3149 - RNA, 100 nt, Artificial Sequence; identical to SEQ ID NO: 3108
  Synthetic

SEQ ID NO: 3150 - RNA, 100 nt, Artificial Sequence; identical to SEQ ID NO: 3108
  Synthetic

SEQ ID NO: 3151 - RNA, 100 nt, Artificial Sequence; identical to SEQ ID NO: 3108
  Synthetic

SEQ ID NO: 3152 - RNA, 100 nt, Artificial Sequence; identical to SEQ ID NO: 3108
  Synthetic

SEQ ID NO: 3153 - RNA, 88 nt, Artificial Sequence; identical to SEQ ID NO: 53
  Synthetic

SEQ ID NO: 3154 - RNA, 88 nt, Artificial Sequence; identical to SEQ ID NO: 53
  Synthetic

SEQ ID NO: 3155 - RNA, 88 nt, Artificial Sequence; identical to SEQ ID NO: 53
  Synthetic

SEQ ID NO: 3156 - RNA, 88 nt, Artificial Sequence; identical to SEQ ID NO: 53
  Synthetic

SEQ ID NO: 3157 - RNA, 88 nt, Artificial Sequence; identical to SEQ ID NO: 53
  Synthetic

SEQ ID NO: 3158 - RNA, 88 nt, Artificial Sequence; identical to SEQ ID NO: 53
  Synthetic

SEQ ID NO: 3159 - RNA, 88 nt, Artificial Sequence; identical to SEQ ID NO: 53
  Synthetic

SEQ ID NO: 3160 - RNA, 88 nt, Artificial Sequence; identical to SEQ ID NO: 53
  Synthetic

SEQ ID NO: 3161 - RNA, 88 nt, Artificial Sequence; identical to SEQ ID NO: 53
  Synthetic

SEQ ID NO: 3162 - RNA, 88 nt, Artificial Sequence; identical to SEQ ID NO: 53
  Synthetic

SEQ ID NO: 3163 - RNA, 88 nt, Artificial Sequence; identical to SEQ ID NO: 53
  Synthetic

SEQ ID NO: 3164 - RNA, 88 nt, Artificial Sequence; identical to SEQ ID NO: 53
  Synthetic

SEQ ID NO: 3165 - RNA, 88 nt, Artificial Sequence; identical to SEQ ID NO: 53
  Synthetic

SEQ ID NO: 3166 - RNA, 88 nt, Artificial Sequence; identical to SEQ ID NO: 53
  Synthetic

SEQ ID NO: 3167 - RNA, 88 nt, Artificial Sequence; identical to SEQ ID NO: 53
  Synthetic

SEQ ID NO: 3168 - RNA, 88 nt, Artificial Sequence; identical to SEQ ID NO: 53
  Synthetic

SEQ ID NO: 3169 - RNA, 88 nt, Artificial Sequence; identical to SEQ ID NO: 53
  Synthetic

SEQ ID NO: 3170 - RNA, 88 nt, Artificial Sequence; identical to SEQ ID NO: 53
  Synthetic

SEQ ID NO: 3171 - RNA, 88 nt, Artificial Sequence; identical to SEQ ID NO: 53
  Synthetic

SEQ ID NO: 3172 - RNA, 88 nt, Artificial Sequence; identical to SEQ ID NO: 53
  Synthetic

SEQ ID NO: 3173 - RNA, 88 nt, Artificial Sequence; identical to SEQ ID NO: 53
  Synthetic

SEQ ID NO: 3174 - RNA, 88 nt, Artificial Sequence; identical to SEQ ID NO: 53
  Synthetic

SEQ ID NO: 3175 - RNA, 88 nt, Artificial Sequence; identical to SEQ ID NO: 53
  Synthetic

SEQ ID NO: 3176 - RNA, 88 nt, Artificial Sequence; identical to SEQ ID NO: 53
  Synthetic

SEQ ID NO: 3177 - RNA, 88 nt, Artificial Sequence; identical to SEQ ID NO: 53
  Synthetic

SEQ ID NO: 3178 - RNA, 88 nt, Artificial Sequence; identical to SEQ ID NO: 53
  Synthetic

SEQ ID NO: 3179 - RNA, 88 nt, Artificial Sequence; identical to SEQ ID NO: 53
  Synthetic

SEQ ID NO: 3180 - RNA, 88 nt, Artificial Sequence; identical to SEQ ID NO: 53
  Synthetic

SEQ ID NO: 3181 - RNA, 88 nt, Artificial Sequence; identical to SEQ ID NO: 53
  Synthetic

SEQ ID NO: 3182 - RNA, 88 nt, Artificial Sequence; identical to SEQ ID NO: 53
  Synthetic

SEQ ID NO: 3183 - RNA, 88 nt, Artificial Sequence; identical to SEQ ID NO: 53
  Synthetic

SEQ ID NO: 3184 - RNA, 88 nt, Artificial Sequence; identical to SEQ ID NO: 53
  Synthetic

SEQ ID NO: 3185 - RNA, 88 nt, Artificial Sequence; identical to SEQ ID NO: 53
  Synthetic

SEQ ID NO: 3186 - RNA, 88 nt, Artificial Sequence; identical to SEQ ID NO: 53
  Synthetic

SEQ ID NO: 3187 - RNA, 88 nt, Artificial Sequence; identical to SEQ ID NO: 53
  Synthetic

SEQ ID NO: 3188 - RNA, 88 nt, Artificial Sequence; identical to SEQ ID NO: 53
  Synthetic

SEQ ID NO: 3189 - RNA, 88 nt, Artificial Sequence; identical to SEQ ID NO: 53
  Synthetic

SEQ ID NO: 3190 - RNA, 88 nt, Artificial Sequence; identical to SEQ ID NO: 53
  Synthetic

SEQ ID NO: 3191 - RNA, 88 nt, Artificial Sequence; identical to SEQ ID NO: 53
  Synthetic

SEQ ID NO: 3192 - RNA, 88 nt, Artificial Sequence; identical to SEQ ID NO: 53
  Synthetic

SEQ ID NO: 3193 - RNA, 88 nt, Artificial Sequence; identical to SEQ ID NO: 53
  Synthetic

SEQ ID NO: 3194 - RNA, 88 nt, Artificial Sequence; identical to SEQ ID NO: 53
  Synthetic

SEQ ID NO: 3195 - RNA, 88 nt, Artificial Sequence; identical to SEQ ID NO: 53
  Synthetic

SEQ ID NO: 3196 - RNA, 88 nt, Artificial Sequence; identical to SEQ ID NO: 53
  Synthetic

SEQ ID NO: 3197 - RNA, 88 nt, Artificial Sequence; identical to SEQ ID NO: 53
  Synthetic

SEQ ID NO: 3198 - RNA, 88 nt, Artificial Sequence
  Synthetic
acacaaauaccaguccagcaguuuuagagcuagaaauagcaaguuaaaauaaggcuaguccguuaucaacuuggcaccgagucggugc

SEQ ID NO: 3199 - RNA, 88 nt, Artificial Sequence; identical to SEQ ID NO: 3198
  Synthetic

SEQ ID NO: 3200 - RNA, 88 nt, Artificial Sequence; identical to SEQ ID NO: 3198
  Synthetic

SEQ ID NO: 3201 - RNA, 88 nt, Artificial Sequence; identical to SEQ ID NO: 3198
  Synthetic

SEQ ID NO: 3202 - RNA, 88 nt, Artificial Sequence; identical to SEQ ID NO: 3198
  Synthetic

SEQ ID NO: 3203 - RNA, 88 nt, Artificial Sequence; identical to SEQ ID NO: 3198
  Synthetic

SEQ ID NO: 3204 - RNA, 88 nt, Artificial Sequence; identical to SEQ ID NO: 3198
  Synthetic

SEQ ID NO: 3205 - RNA, 88 nt, Artificial Sequence; identical to SEQ ID NO: 3198
  Synthetic

SEQ ID NO: 3206 - RNA, 88 nt, Artificial Sequence; identical to SEQ ID NO: 3198
  Synthetic

SEQ ID NO: 3207 - RNA, 88 nt, Artificial Sequence; identical to SEQ ID NO: 3198
  Synthetic

SEQ ID NO: 3208 - RNA, 88 nt, Artificial Sequence; identical to SEQ ID NO: 3198
  Synthetic

SEQ ID NO: 3209 - RNA, 88 nt, Artificial Sequence; identical to SEQ ID NO: 3198
  Synthetic

SEQ ID NO: 3210 - RNA, 88 nt, Artificial Sequence; identical to SEQ ID NO: 3198
  Synthetic

SEQ ID NO: 3211 - RNA, 88 nt, Artificial Sequence; identical to SEQ ID NO: 3198
  Synthetic

SEQ ID NO: 3212 - RNA, 88 nt, Artificial Sequence; identical to SEQ ID NO: 3198
  Synthetic

SEQ ID NO: 3213 - RNA, 88 nt, Artificial Sequence; identical to SEQ ID NO: 3198
  Synthetic

SEQ ID NO: 3214 - RNA, 88 nt, Artificial Sequence; identical to SEQ ID NO: 3198
  Synthetic

SEQ ID NO: 3215 - RNA, 88 nt, Artificial Sequence; identical to SEQ ID NO: 3198
  Synthetic

SEQ ID NO: 3216 - RNA, 88 nt, Artificial Sequence; identical to SEQ ID NO: 3198
  Synthetic

SEQ ID NO: 3217 - RNA, 88 nt, Artificial Sequence; identical to SEQ ID NO: 3198
  Synthetic

SEQ ID NO: 3218 - RNA, 88 nt, Artificial Sequence; identical to SEQ ID NO: 3198
  Synthetic

SEQ ID NO: 3219 - RNA, 88 nt, Artificial Sequence; identical to SEQ ID NO: 3198
  Synthetic

SEQ ID NO: 3220 - RNA, 88 nt, Artificial Sequence; identical to SEQ ID NO: 3198
  Synthetic

SEQ ID NO: 3221 - RNA, 88 nt, Artificial Sequence; identical to SEQ ID NO: 3198
  Synthetic

SEQ ID NO: 3222 - RNA, 88 nt, Artificial Sequence; identical to SEQ ID NO: 3198
  Synthetic

SEQ ID NO: 3223 - RNA, 88 nt, Artificial Sequence; identical to SEQ ID NO: 3198
  Synthetic

SEQ ID NO: 3224 - RNA, 88 nt, Artificial Sequence; identical to SEQ ID NO: 3198
  Synthetic

SEQ ID NO: 3225 - RNA, 88 nt, Artificial Sequence; identical to SEQ ID NO: 3198
  Synthetic

SEQ ID NO: 3226 - RNA, 88 nt, Artificial Sequence; identical to SEQ ID NO: 3198
  Synthetic

SEQ ID NO: 3227 - RNA, 88 nt, Artificial Sequence; identical to SEQ ID NO: 3198
  Synthetic

SEQ ID NO: 3228 - RNA, 88 nt, Artificial Sequence; identical to SEQ ID NO: 3198
  Synthetic

SEQ ID NO: 3229 - RNA, 88 nt, Artificial Sequence; identical to SEQ ID NO: 3198
  Synthetic

SEQ ID NO: 3230 - RNA, 88 nt, Artificial Sequence; identical to SEQ ID NO: 3198
  Synthetic

SEQ ID NO: 3231 - RNA, 88 nt, Artificial Sequence; identical to SEQ ID NO: 3198
  Synthetic

SEQ ID NO: 3232 - RNA, 88 nt, Artificial Sequence; identical to SEQ ID NO: 3198
  Synthetic

SEQ ID NO: 3233 - RNA, 88 nt, Artificial Sequence; identical to SEQ ID NO: 3198
  Synthetic

SEQ ID NO: 3234 - RNA, 88 nt, Artificial Sequence; identical to SEQ ID NO: 3198
  Synthetic

SEQ ID NO: 3235 - RNA, 88 nt, Artificial Sequence; identical to SEQ ID NO: 3198
  Synthetic

SEQ ID NO: 3236 - RNA, 88 nt, Artificial Sequence; identical to SEQ ID NO: 3198
  Synthetic

SEQ ID NO: 3237 - RNA, 88 nt, Artificial Sequence; identical to SEQ ID NO: 3198
  Synthetic

SEQ ID NO: 3238 - RNA, 88 nt, Artificial Sequence; identical to SEQ ID NO: 3198
  Synthetic

SEQ ID NO: 3239 - RNA, 88 nt, Artificial Sequence; identical to SEQ ID NO: 3198
  Synthetic

SEQ ID NO: 3240 - RNA, 88 nt, Artificial Sequence; identical to SEQ ID NO: 3198
  Synthetic

SEQ ID NO: 3241 - RNA, 88 nt, Artificial Sequence; identical to SEQ ID NO: 3198
  Synthetic

SEQ ID NO: 3242 - RNA, 88 nt, Artificial Sequence; identical to SEQ ID NO: 3198
  Synthetic

SEQ ID NO: 3243 - RNA, 88 nt, Artificial Sequence
  Synthetic
uguuggacuggugugccagcguuuuagagcuagaaauagcaaguuaaaauaaggcuaguccguuaucaacuuggcaccgagucggugc

SEQ ID NO: 3244 - RNA, 88 nt, Artificial Sequence; identical to SEQ ID NO: 3243
  Synthetic

SEQ ID NO: 3245 - RNA, 88 nt, Artificial Sequence; identical to SEQ ID NO: 3243
  Synthetic

SEQ ID NO: 3246 - RNA, 88 nt, Artificial Sequence; identical to SEQ ID NO: 3243
  Synthetic

SEQ ID NO: 3247 - RNA, 88 nt, Artificial Sequence; identical to SEQ ID NO: 3243
  Synthetic

SEQ ID NO: 3248 - RNA, 88 nt, Artificial Sequence; identical to SEQ ID NO: 3243
  Synthetic

SEQ ID NO: 3249 - RNA, 88 nt, Artificial Sequence; identical to SEQ ID NO: 3243
  Synthetic

SEQ ID NO: 3250 - RNA, 88 nt, Artificial Sequence; identical to SEQ ID NO: 3243
  Synthetic

SEQ ID NO: 3251 - RNA, 88 nt, Artificial Sequence; identical to SEQ ID NO: 3243
  Synthetic

SEQ ID NO: 3252 - RNA, 88 nt, Artificial Sequence; identical to SEQ ID NO: 3243
  Synthetic

SEQ ID NO: 3253 - RNA, 88 nt, Artificial Sequence; identical to SEQ ID NO: 3243
  Synthetic

SEQ ID NO: 3254 - RNA, 88 nt, Artificial Sequence; identical to SEQ ID NO: 3243
  Synthetic

SEQ ID NO: 3255 - RNA, 88 nt, Artificial Sequence; identical to SEQ ID NO: 3243
  Synthetic

SEQ ID NO: 3256 - RNA, 88 nt, Artificial Sequence; identical to SEQ ID NO: 3243
  Synthetic

SEQ ID NO: 3257 - RNA, 88 nt, Artificial Sequence; identical to SEQ ID NO: 3243
  Synthetic

SEQ ID NO: 3258 - RNA, 88 nt, Artificial Sequence; identical to SEQ ID NO: 3243
  Synthetic

SEQ ID NO: 3259 - RNA, 88 nt, Artificial Sequence; identical to SEQ ID NO: 3243
  Synthetic

SEQ ID NO: 3260 - RNA, 88 nt, Artificial Sequence; identical to SEQ ID NO: 3243
  Synthetic

SEQ ID NO: 3261 - RNA, 88 nt, Artificial Sequence; identical to SEQ ID NO: 3243
  Synthetic

SEQ ID NO: 3262 - RNA, 88 nt, Artificial Sequence; identical to SEQ ID NO: 3243
  Synthetic

SEQ ID NO: 3263 - RNA, 88 nt, Artificial Sequence; identical to SEQ ID NO: 3243
  Synthetic

SEQ ID NO: 3264 - RNA, 88 nt, Artificial Sequence; identical to SEQ ID NO: 3243
  Synthetic

SEQ ID NO: 3265 - RNA, 88 nt, Artificial Sequence; identical to SEQ ID NO: 3243
  Synthetic

SEQ ID NO: 3266 - RNA, 88 nt, Artificial Sequence; identical to SEQ ID NO: 3243
  Synthetic

SEQ ID NO: 3267 - RNA, 88 nt, Artificial Sequence; identical to SEQ ID NO: 3243
  Synthetic

SEQ ID NO: 3268 - RNA, 88 nt, Artificial Sequence; identical to SEQ ID NO: 3243
  Synthetic

SEQ ID NO: 3269 - RNA, 88 nt, Artificial Sequence; identical to SEQ ID NO: 3243
  Synthetic

SEQ ID NO: 3270 - RNA, 88 nt, Artificial Sequence; identical to SEQ ID NO: 3243
  Synthetic

SEQ ID NO: 3271 - RNA, 88 nt, Artificial Sequence; identical to SEQ ID NO: 3243
  Synthetic

SEQ ID NO: 3272 - RNA, 88 nt, Artificial Sequence; identical to SEQ ID NO: 3243
  Synthetic

SEQ ID NO: 3273 - RNA, 88 nt, Artificial Sequence; identical to SEQ ID NO: 3243
  Synthetic

SEQ ID NO: 3274 - RNA, 88 nt, Artificial Sequence; identical to SEQ ID NO: 3243
  Synthetic

SEQ ID NO: 3275 - RNA, 88 nt, Artificial Sequence; identical to SEQ ID NO: 3243
  Synthetic

SEQ ID NO: 3276 - RNA, 88 nt, Artificial Sequence; identical to SEQ ID NO: 3243
  Synthetic

SEQ ID NO: 3277 - RNA, 88 nt, Artificial Sequence; identical to SEQ ID NO: 3243
  Synthetic

SEQ ID NO: 3278 - RNA, 88 nt, Artificial Sequence; identical to SEQ ID NO: 3243
  Synthetic

SEQ ID NO: 3279 - RNA, 88 nt, Artificial Sequence; identical to SEQ ID NO: 3243
  Synthetic

SEQ ID NO: 3280 - RNA, 88 nt, Artificial Sequence; identical to SEQ ID NO: 3243
  Synthetic

SEQ ID NO: 3281 - RNA, 88 nt, Artificial Sequence; identical to SEQ ID NO: 3243
  Synthetic

SEQ ID NO: 3282 - RNA, 88 nt, Artificial Sequence; identical to SEQ ID NO: 3243
  Synthetic

SEQ ID NO: 3283 - RNA, 88 nt, Artificial Sequence; identical to SEQ ID NO: 3243
  Synthetic

SEQ ID NO: 3284 - RNA, 88 nt, Artificial Sequence; identical to SEQ ID NO: 3243
  Synthetic

SEQ ID NO: 3285 - RNA, 88 nt, Artificial Sequence; identical to SEQ ID NO: 3243
  Synthetic

SEQ ID NO: 3286 - RNA, 88 nt, Artificial Sequence; identical to SEQ ID NO: 3243
  Synthetic

SEQ ID NO: 3287 - RNA, 88 nt, Artificial Sequence; identical to SEQ ID NO: 3243
  Synthetic

SEQ ID NO: 3288 - RNA, 100 nt, Artificial Sequence
  Synthetic
agccagcuccagcugaccacguuuuagagcuagaaauagcaaguuaaaauaaggcuaguccguuaucaacuugaaaaaguggcaccgagucggugcuuuu

SEQ ID NO: 3289 - RNA, 100 nt, Artificial Sequence
  Synthetic
gcugaggaacaggccauugcguuuuagagcuagaaauagcaaguuaaaauaaggcuaguccguuaucaacuugaaaaaguggcaccgagucggugcuuuu

SEQ ID NO: 3290 - RNA, 100 nt, Artificial Sequence
  Synthetic
acucacgaugaaauccuggaguuuuagagcuagaaauagcaaguuaaaauaaggcuaguccguuaucaacuugaaaaaguggcaccgagucggugcuuuu

SEQ ID NO: 3291 - RNA, 100 nt, Artificial Sequence
  Synthetic
gaucuguuucuuggccucuuguuuuagagcuagaaauagcaaguuaaaauaaggcuaguccguuaucaacuugaaaaaguggcaccgagucggugcuuuu

SEQ ID NO: 3292 - RNA, 100 nt, Artificial Sequence
  Synthetic
gaaggcgaacucagccagguguuuuagagcuagaaauagcaaguuaaaauaaggcuaguccguuaucaacuugaaaaaguggcaccgagucggugcuuuu

SEQ ID NO: 3293 - RNA, 100 nt, Artificial Sequence
  Synthetic
caaccucacggagauuccggguuuuagagcuagaaauagcaaguuaaaauaaggcuaguccguuaucaacuugaaaaaguggcaccgagucggugcuuuu

SEQ ID NO: 3294 - RNA, 100 nt, Artificial Sequence; identical to SEQ ID NO: 3108
  Synthetic

SEQ ID NO: 3295 - RNA, 100 nt, Artificial Sequence; identical to SEQ ID NO: 3288
  Synthetic

SEQ ID NO: 3296 - RNA, 100 nt, Artificial Sequence; identical to SEQ ID NO: 3290
  Synthetic

SEQ ID NO: 3297 - RNA, 100 nt, Artificial Sequence; identical to SEQ ID NO: 3291
  Synthetic

SEQ ID NO: 3298 - RNA, 100 nt, Artificial Sequence; identical to SEQ ID NO: 3293
  Synthetic

SEQ ID NO: 3299 - RNA, 100 nt, Artificial Sequence; identical to SEQ ID NO: 3108
  Synthetic

SEQ ID NO: 3300 - RNA, 88 nt, Artificial Sequence
  Synthetic
agccagcuccagcugaccacguuuuagagcuagaaauagcaaguuaaaauaaggcuaguccguuaucaacuuggcaccgagucggugc

SEQ ID NO: 3301 - RNA, 88 nt, Artificial Sequence
  Synthetic
acucacgaugaaauccuggaguuuuagagcuagaaauagcaaguuaaaauaaggcuaguccguuaucaacuuggcaccgagucggugc

SEQ ID NO: 3302 - RNA, 88 nt, Artificial Sequence
  Synthetic
gaucuguuucuuggccucuuguuuuagagcuagaaauagcaaguuaaaauaaggcuaguccguuaucaacuuggcaccgagucggugc

SEQ ID NO: 3303 - RNA, 88 nt, Artificial Sequence
  Synthetic
caaccucacggagauuccggguuuuagagcuagaaauagcaaguuaaaauaaggcuaguccguuaucaacuuggcaccgagucggugc

SEQ ID NO: 3304 - RNA, 88 nt, Artificial Sequence; identical to SEQ ID NO: 3243
  Synthetic

SEQ ID NO: 3305 - RNA, 88 nt, Artificial Sequence; identical to SEQ ID NO: 53
  Synthetic

SEQ ID NO: 3306 - RNA, 88 nt, Artificial Sequence; identical to SEQ ID NO: 53
  Synthetic

SEQ ID NO: 3307 - RNA, 88 nt, Artificial Sequence; identical to SEQ ID NO: 53
  Synthetic

SEQ ID NO: 3308 - RNA, 88 nt, Artificial Sequence; identical to SEQ ID NO: 53
  Synthetic

SEQ ID NO: 3309 - RNA, 88 nt, Artificial Sequence; identical to SEQ ID NO: 53
  Synthetic

SEQ ID NO: 3310 - RNA, 88 nt, Artificial Sequence; identical to SEQ ID NO: 53
  Synthetic

SEQ ID NO: 3311 - RNA, 88 nt, Artificial Sequence; identical to SEQ ID NO: 53
  Synthetic

SEQ ID NO: 3312 - RNA, 88 nt, Artificial Sequence; identical to SEQ ID NO: 53
  Synthetic

SEQ ID NO: 3313 - RNA, 88 nt, Artificial Sequence; identical to SEQ ID NO: 53
  Synthetic

SEQ ID NO: 3314 - RNA, 88 nt, Artificial Sequence; identical to SEQ ID NO: 53
  Synthetic

SEQ ID NO: 3315 - RNA, 88 nt, Artificial Sequence; identical to SEQ ID NO: 2
  Synthetic

SEQ ID NO: 3316 - RNA, 88 nt, Artificial Sequence; identical to SEQ ID NO: 2
  Synthetic

SEQ ID NO: 3317 - RNA, 88 nt, Artificial Sequence; identical to SEQ ID NO: 2
  Synthetic

SEQ ID NO: 3318 - RNA, 88 nt, Artificial Sequence; identical to SEQ ID NO: 2
  Synthetic

SEQ ID NO: 3319 - RNA, 88 nt, Artificial Sequence; identical to SEQ ID NO: 2
  Synthetic

SEQ ID NO: 3320 - RNA, 88 nt, Artificial Sequence; identical to SEQ ID NO: 2
  Synthetic

SEQ ID NO: 3321 - RNA, 88 nt, Artificial Sequence; identical to SEQ ID NO: 2
  Synthetic

SEQ ID NO: 3322 - RNA, 88 nt, Artificial Sequence; identical to SEQ ID NO: 2
  Synthetic

SEQ ID NO: 3323 - RNA, 88 nt, Artificial Sequence; identical to SEQ ID NO: 2
  Synthetic

SEQ ID NO: 3324 - RNA, 88 nt, Artificial Sequence; identical to SEQ ID NO: 2
  Synthetic

SEQ ID NO: 3325 - RNA, 88 nt, Artificial Sequence; identical to SEQ ID NO: 2
  Synthetic

SEQ ID NO: 3326 - RNA, 100 nt, Artificial Sequence; identical to SEQ ID NO: 404
  Synthetic

SEQ ID NO: 3327 - RNA, 100 nt, Artificial Sequence; identical to SEQ ID NO: 404
  Synthetic

SEQ ID NO: 3328 - RNA, 100 nt, Artificial Sequence; identical to SEQ ID NO: 404
  Synthetic

SEQ ID NO: 3329 - RNA, 100 nt, Artificial Sequence; identical to SEQ ID NO: 404
  Synthetic

SEQ ID NO: 3330 - RNA, 100 nt, Artificial Sequence; identical to SEQ ID NO: 404
  Synthetic

SEQ ID NO: 3331 - RNA, 100 nt, Artificial Sequence; identical to SEQ ID NO: 404
  Synthetic

SEQ ID NO: 3332 - RNA, 100 nt, Artificial Sequence; identical to SEQ ID NO: 404
  Synthetic

SEQ ID NO: 3333 - RNA, 100 nt, Artificial Sequence; identical to SEQ ID NO: 404
  Synthetic

SEQ ID NO: 3334 - RNA, 100 nt, Artificial Sequence; identical to SEQ ID NO: 404
  Synthetic

SEQ ID NO: 3335 - RNA, 100 nt, Artificial Sequence; identical to SEQ ID NO: 404
  Synthetic

SEQ ID NO: 3336 - RNA, 100 nt, Artificial Sequence; identical to SEQ ID NO: 404
  Synthetic

SEQ ID NO: 3337 - RNA, 100 nt, Artificial Sequence; identical to SEQ ID NO: 404
  Synthetic

SEQ ID NO: 3338 - RNA, 100 nt, Artificial Sequence; identical to SEQ ID NO: 404
  Synthetic

SEQ ID NO: 3339 - RNA, 100 nt, Artificial Sequence; identical to SEQ ID NO: 404
  Synthetic

SEQ ID NO: 3340 - RNA, 88 nt, Artificial Sequence; identical to SEQ ID NO: 2
  Synthetic

SEQ ID NO: 3341 - RNA, 36 nt, Artificial Sequence
  Synthetic
acacaaauaccaguccagcgguuuuagagcuaugcu

SEQ ID NO: 3342 - RNA, 67 nt, Artificial Sequence
  Synthetic
agcauagcaaguuaaaauaaggcuaguccguuaucaacuugaaaaaguggcaccgagucggugcuuu

SEQ ID NO: 3343 - RNA, 100 nt, Artificial Sequence; identical to SEQ ID NO: 1012
  Synthetic
  misc_feature (1)..(20): n is a, c, g, or u

SEQ ID NO: 3344 - RNA, 100 nt, Artificial Sequence; identical to SEQ ID NO: 1012
  Synthetic
  misc_feature (1)..(20): n is a, c, g, or u

SEQ ID NO: 3345 - RNA, 100 nt, Artificial Sequence; identical to SEQ ID NO: 1012
  Synthetic
  misc_feature (1)..(20): n is a, c, g, or u

SEQ ID NO: 3346 - RNA, 100 nt, Artificial Sequence; identical to SEQ ID NO: 1012
  Synthetic
  misc_feature (1)..(20): n is a, c, g, or u

SEQ ID NO: 3347 - RNA, 100 nt, Artificial Sequence; identical to SEQ ID NO: 1012
  Synthetic
  misc_feature (1)..(20): n is a, c, g, or u

SEQ ID NO: 3348 - RNA, 100 nt, Artificial Sequence; identical to SEQ ID NO: 1012
  Synthetic
  misc_feature (1)..(20): n is a, c, g, or u

SEQ ID NO: 3349 - RNA, 100 nt, Artificial Sequence; identical to SEQ ID NO: 1012
  Synthetic
  misc_feature (1)..(20): n is a, c, g, or u

SEQ ID NO: 3350 - RNA, 100 nt, Artificial Sequence; identical to SEQ ID NO: 1012
  Synthetic
  misc_feature (1)..(20): n is a, c, g, or u

SEQ ID NO: 3351 - RNA, 100 nt, Artificial Sequence; identical to SEQ ID NO: 1012
  Synthetic
  misc_feature (1)..(20): n is a, c, g, or u

SEQ ID NO: 3352 - RNA, 100 nt, Artificial Sequence; identical to SEQ ID NO: 1012
  Synthetic
  misc_feature (1)..(20): n is a, c, g, or u

SEQ ID NO: 3353 - RNA, 100 nt, Artificial Sequence; identical to SEQ ID NO: 1012
  Synthetic
  misc_feature (1)..(20): n is a, c, g, or u

SEQ ID NO: 3354 - RNA, 100 nt, Artificial Sequence; identical to SEQ ID NO: 1012
  Synthetic
  misc_feature (1)..(20): n is a, c, g, or u

SEQ ID NO: 3355 - RNA, 100 nt, Artificial Sequence; identical to SEQ ID NO: 1012
  Synthetic
  misc_feature (1)..(20): n is a, c, g, or u

SEQ ID NO: 3356 - RNA, 100 nt, Artificial Sequence; identical to SEQ ID NO: 1012
  Synthetic
  misc_feature (1)..(20): n is a, c, g, or u

SEQ ID NO: 3357 - RNA, 100 nt, Artificial Sequence; identical to SEQ ID NO: 1012
  Synthetic
  misc_feature (1)..(20): n is a, c, g, or u

SEQ ID NO: 3358 - RNA, 100 nt, Artificial Sequence; identical to SEQ ID NO: 1012
  Synthetic
  misc_feature (1)..(20): n is a, c, g, or u

SEQ ID NO: 3359 - RNA, 100 nt, Artificial Sequence; identical to SEQ ID NO: 1012
  Synthetic
  misc_feature (1)..(20): n is a, c, g, or u

SEQ ID NO: 3360 - RNA, 100 nt, Artificial Sequence; identical to SEQ ID NO: 1012
  Synthetic
  misc_feature (1)..(20): n is a, c, g, or u

SEQ ID NO: 3361 - RNA, 100 nt, Artificial Sequence; identical to SEQ ID NO: 1012
  Synthetic
  misc_feature (1)..(20): n is a, c, g, or u

SEQ ID NO: 3362 - RNA, 100 nt, Artificial Sequence; identical to SEQ ID NO: 1012
  Synthetic
  misc_feature (1)..(20): n is a, c, g, or u

SEQ ID NO: 3363 - RNA, 100 nt, Artificial Sequence; identical to SEQ ID NO: 1012
  Synthetic
  misc_feature (1)..(20): n is a, c, g, or u

SEQ ID NO: 3364 - RNA, 100 nt, Artificial Sequence; identical to SEQ ID NO: 1012
  Synthetic
  misc_feature (1)..(20): n is a, c, g, or u

SEQ ID NO: 3365 - RNA, 100 nt, Artificial Sequence; identical to SEQ ID NO: 1012
  Synthetic
  misc_feature (1)..(20): n is a, c, g, or u

SEQ ID NO: 3366 - RNA, 100 nt, Artificial Sequence; identical to SEQ ID NO: 1012
  Synthetic
  misc_feature (1)..(20): n is a, c, g, or u

SEQ ID NO: 3367 - RNA, 100 nt, Artificial Sequence; identical to SEQ ID NO: 1012
  Synthetic
  misc_feature (1)..(20): n is a, c, g, or u

SEQ ID NO: 3368 - RNA, 100 nt, Artificial Sequence; identical to SEQ ID NO: 1012
  Synthetic
  misc_feature (1)..(20): n is a, c, g, or u

SEQ ID NO: 3369 - RNA, 100 nt, Artificial Sequence; identical to SEQ ID NO: 1012
  Synthetic
  misc_feature (1)..(20): n is a, c, g, or u

SEQ ID NO: 3370 - RNA, 100 nt, Artificial Sequence; identical to SEQ ID NO: 1012
  Synthetic
  misc_feature (1)..(20): n is a, c, g, or u

SEQ ID NO: 3371 - RNA, 100 nt, Artificial Sequence; identical to SEQ ID NO: 1012
  Synthetic
  misc_feature (1)..(20): n is a, c, g, or u

SEQ ID NO: 3372 - RNA, 100 nt, Artificial Sequence; identical to SEQ ID NO: 1012
  Synthetic
  misc_feature (1)..(20): n is a, c, g, or u

SEQ ID NO: 3373 - RNA, 100 nt, Artificial Sequence; identical to SEQ ID NO: 1012
  Synthetic
  misc_feature (1)..(20): n is a, c, g, or u

SEQ ID NO: 3374 - RNA, 100 nt, Artificial Sequence; identical to SEQ ID NO: 1012
  Synthetic
  misc_feature (1)..(20): n is a, c, g, or u

SEQ ID NO: 3375 - RNA, 100 nt, Artificial Sequence; identical to SEQ ID NO: 1012
  Synthetic
  misc_feature (1)..(20): n is a, c, g, or u

SEQ ID NO: 3376 - RNA, 100 nt, Artificial Sequence; identical to SEQ ID NO: 1012
  Synthetic
  misc_feature (1)..(20): n is a, c, g, or u

SEQ ID NO: 3377 - RNA, 100 nt, Artificial Sequence; identical to SEQ ID NO: 1012
  Synthetic
  misc_feature (1)..(20): n is a, c, g, or u

SEQ ID NO: 3378 - RNA, 100 nt, Artificial Sequence; identical to SEQ ID NO: 1012
  Synthetic
  misc_feature (1)..(20): n is a, c, g, or u

SEQ ID NO: 3379 - RNA, 100 nt, Artificial Sequence; identical to SEQ ID NO: 1012
  Synthetic
  misc_feature (1)..(20): n is a, c, g, or u

SEQ ID NO: 3380 - RNA, 100 nt, Artificial Sequence; identical to SEQ ID NO: 1012
  Synthetic
  misc_feature (1)..(20): n is a, c, g, or u

SEQ ID NO: 3381 - RNA, 100 nt, Artificial Sequence; identical to SEQ ID NO: 1012
  Synthetic
  misc_feature (1)..(20): n is a, c, g, or u

SEQ ID NO: 3382 - RNA, 100 nt, Artificial Sequence; identical to SEQ ID NO: 1012
  Synthetic
  misc_feature (1)..(20): n is a, c, g, or u

SEQ ID NO: 3383 - RNA, 100 nt, Artificial Sequence; identical to SEQ ID NO: 1012
  Synthetic
  misc_feature (1)..(20): n is a, c, g, or u

SEQ ID NO: 3384 - RNA, 100 nt, Artificial Sequence; identical to SEQ ID NO: 1012
  Synthetic
  misc_feature (1)..(20): n is a, c, g, or u

SEQ ID NO: 3385 - RNA, 100 nt, Artificial Sequence; identical to SEQ ID NO: 1012
  Synthetic
  misc_feature (1)..(20): n is a, c, g, or u

SEQ ID NO: 3386 - RNA, 100 nt, Artificial Sequence; identical to SEQ ID NO: 1012
  Synthetic
  misc_feature (1)..(20): n is a, c, g, or u

SEQ ID NO: 3387 - RNA, 100 nt, Artificial Sequence; identical to SEQ ID NO: 1012
  Synthetic
  misc_feature (1)..(20): n is a, c, g, or u

SEQ ID NO: 3388 - RNA, 89 nt, Artificial Sequence
  Synthetic
  misc_feature (1)..(20): n is a, c, g, or u
nnnnnnnnnnnnnnnnnnnnguuuuagagcuagaaauagcaaguuaaaauaaggcuaguccguuaucaacuuggcaccgagucggugcu

SEQ ID NO: 3389 - RNA, 89 nt, Artificial Sequence; identical to SEQ ID NO: 3388
  Synthetic
  misc_feature (1)..(20): n is a, c, g, or u

SEQ ID NO: 3390 - RNA, 89 nt, Artificial Sequence; identical to SEQ ID NO: 3388
  Synthetic
  misc_feature (1)..(20): n is a, c, g, or u

SEQ ID NO: 3391 - RNA, 89 nt, Artificial Sequence; identical to SEQ ID NO: 3388
  Synthetic
  misc_feature (1)..(20): n is a, c, g, or u

SEQ ID NO: 3392 - RNA, 89 nt, Artificial Sequence; identical to SEQ ID NO: 3388
  Synthetic
  misc_feature (1)..(20): n is a, c, g, or u

SEQ ID NO: 3393 - RNA, 89 nt, Artificial Sequence; identical to SEQ ID NO: 3388
  Synthetic
  misc_feature (1)..(20): n is a, c, g, or u

SEQ ID NO: 3394 - RNA, 89 nt, Artificial Sequence; identical to SEQ ID NO: 3388
  Synthetic
  misc_feature (1)..(20): n is a, c, g, or u

SEQ ID NO: 3395 - RNA, 89 nt, Artificial Sequence; identical to SEQ ID NO: 3388
  Synthetic
  misc_feature (1)..(20): n is a, c, g, or u

SEQ ID NO: 3396 - RNA, 89 nt, Artificial Sequence; identical to SEQ ID NO: 3388
  Synthetic
  misc_feature (1)..(20): n is a, c, g, or u

SEQ ID NO: 3397 - RNA, 89 nt, Artificial Sequence; identical to SEQ ID NO: 3388
  Synthetic
  misc_feature (1)..(20): n is a, c, g, or u

SEQ ID NO: 3398 - RNA, 89 nt, Artificial Sequence; identical to SEQ ID NO: 3388
  Synthetic
  misc_feature (1)..(20): n is a, c, g, or u

SEQ ID NO: 3399 - RNA, 89 nt, Artificial Sequence; identical to SEQ ID NO: 3388
  Synthetic
  misc_feature (1)..(20): n is a, c, g, or u

SEQ ID NO: 3400 - RNA, 89 nt, Artificial Sequence; identical to SEQ ID NO: 3388
  Synthetic
  misc_feature (1)..(20): n is a, c, g, or u

SEQ ID NO: 3401 - RNA, 89 nt, Artificial Sequence; identical to SEQ ID NO: 3388
  Synthetic
  misc_feature (1)..(20): n is a, c, g, or u

SEQ ID NO: 3402 - RNA, 89 nt, Artificial Sequence; identical to SEQ ID NO: 3388
  Synthetic
  misc_feature (1)..(20): n is a, c, g, or u

SEQ ID NO: 3403 - RNA, 89 nt, Artificial Sequence; identical to SEQ ID NO: 3388
  Synthetic
  misc_feature (1)..(20): n is a, c, g, or u

SEQ ID NO: 3404 - RNA, 89 nt, Artificial Sequence; identical to SEQ ID NO: 3388
  Synthetic
  misc_feature (1)..(20): n is a, c, g, or u

SEQ ID NO: 3405 - RNA, 89 nt, Artificial Sequence; identical to SEQ ID NO: 3388
  Synthetic
  misc_feature (1)..(20): n is a, c, g, or u

SEQ ID NO: 3406 - RNA, 89 nt, Artificial Sequence; identical to SEQ ID NO: 3388
  Synthetic
  misc_feature (1)..(20): n is a, c, g, or u

SEQ ID NO: 3407 - RNA, 89 nt, Artificial Sequence; identical to SEQ ID NO: 3388
  Synthetic
  misc_feature (1)..(20): n is a, c, g, or u

SEQ ID NO: 3408 - RNA, 89 nt, Artificial Sequence; identical to SEQ ID NO: 3388
  Synthetic
  misc_feature (1)..(20): n is a, c, g, or u

SEQ ID NO: 3409 - RNA, 89 nt, Artificial Sequence; identical to SEQ ID NO: 3388
  Synthetic
  misc_feature (1)..(20): n is a, c, g, or u

SEQ ID NO: 3410 - RNA, 89 nt, Artificial Sequence; identical to SEQ ID NO: 3388
  Synthetic
  misc_feature (1)..(20): n is a, c, g, or u

SEQ ID NO: 3411 - RNA, 89 nt, Artificial Sequence; identical to SEQ ID NO: 3388
  Synthetic
  misc_feature (1)..(20): n is a, c, g, or u

SEQ ID NO: 3412 - RNA, 89 nt, Artificial Sequence; identical to SEQ ID NO: 3388
  Synthetic
  misc_feature (1)..(20): n is a, c, g, or u

SEQ ID NO: 3413 - RNA, 89 nt, Artificial Sequence; identical to SEQ ID NO: 3388
  Synthetic
  misc_feature (1)..(20): n is a, c, g, or u

SEQ ID NO: 3414 - RNA, 89 nt, Artificial Sequence; identical to SEQ ID NO: 3388
  Synthetic
  misc_feature (1)..(20): n is a, c, g, or u

SEQ ID NO: 3415 - RNA, 89 nt, Artificial Sequence; identical to SEQ ID NO: 3388
  Synthetic
  misc_feature (1)..(20): n is a, c, g, or u

SEQ ID NO: 3416 - RNA, 89 nt, Artificial Sequence; identical to SEQ ID NO: 3388
  Synthetic
  misc_feature (1)..(20): n is a, c, g, or u

SEQ ID NO: 3417 - RNA, 89 nt, Artificial Sequence; identical to SEQ ID NO: 3388
  Synthetic
  misc_feature (1)..(20): n is a, c, g, or u

SEQ ID NO: 3418 - RNA, 89 nt, Artificial Sequence; identical to SEQ ID NO: 3388
  Synthetic
  misc_feature (1)..(20): n is a, c, g, or u

SEQ ID NO: 3419 - RNA, 89 nt, Artificial Sequence; identical to SEQ ID NO: 3388
  Synthetic
  misc_feature (1)..(20): n is a, c, g, or u

SEQ ID NO: 3420 - RNA, 89 nt, Artificial Sequence; identical to SEQ ID NO: 3388
  Synthetic
  misc_feature (1)..(20): n is a, c, g, or u

SEQ ID NO: 3421 - RNA, 89 nt, Artificial Sequence; identical to SEQ ID NO: 3388
  Synthetic
  misc_feature (1)..(20): n is a, c, g, or u

SEQ ID NO: 3422 - RNA, 89 nt, Artificial Sequence; identical to SEQ ID NO: 3388
  Synthetic
  misc_feature (1)..(20): n is a, c, g, or u

SEQ ID NO: 3423 - RNA, 89 nt, Artificial Sequence; identical to SEQ ID NO: 3388
  Synthetic
  misc_feature (1)..(20): n is a, c, g, or u

SEQ ID NO: 3424 - RNA, 89 nt, Artificial Sequence; identical to SEQ ID NO: 3388
  Synthetic
  misc_feature (1)..(20): n is a, c, g, or u

SEQ ID NO: 3425 - RNA, 89 nt, Artificial Sequence; identical to SEQ ID NO: 3388
  Synthetic
  misc_feature (1)..(20): n is a, c, g, or u

SEQ ID NO: 3426 - RNA, 89 nt, Artificial Sequence; identical to SEQ ID NO: 3388
  Synthetic
  misc_feature (1)..(20): n is a, c, g, or u

SEQ ID NO: 3427 - RNA, 89 nt, Artificial Sequence; identical to SEQ ID NO: 3388
  Synthetic
  misc_feature (1)..(20): n is a, c, g, or u

SEQ ID NO: 3428 - RNA, 89 nt, Artificial Sequence; identical to SEQ ID NO: 3388
  Synthetic
  misc_feature (1)..(20): n is a, c, g, or u

SEQ ID NO: 3429 - RNA, 89 nt, Artificial Sequence; identical to SEQ ID NO: 3388
  Synthetic
  misc_feature (1)..(20): n is a, c, g, or u

SEQ ID NO: 3430 - RNA, 89 nt, Artificial Sequence; identical to SEQ ID NO: 3388
  Synthetic
  misc_feature (1)..(20): n is a, c, g, or u

SEQ ID NO: 3431 - RNA, 89 nt, Artificial Sequence; identical to SEQ ID NO: 3388
  Synthetic
  misc_feature (1)..(20): n is a, c, g, or u

SEQ ID NO: 3432 - RNA, 89 nt, Artificial Sequence; identical to SEQ ID NO: 3388
  Synthetic
  misc_feature (1)..(20): n is a, c, g, or u

SEQ ID NO: 3433-3498 - skipped (66 entries)

SEQ ID NO: 3499 - RNA, 4501 nt, Artificial Sequence
  Synthetic
gggucccgcagucggcguccagcggcucugcuuguucgugugugugucguugcaggccuuauucggauccgccaccauggacaagaaguacagcaucggacuggacaucggaacaaacagcgucggaugggcagucaucacagacgaauacaaggucccgagcaagaaguucaagguccugggaaacacagacagacacagcaucaagaagaaccugaucggagcacugcuguucgacagcggagaaacagcagaagcaacaagacugaagagaacagcaagaagaagauacacaagaagaaagaacagaaucugcuaccugcaggaaaucuucagcaacgaaauggcaaaggucgacgacagcuucuuccacagacuggaagaaagcuuccuggucgaagaagacaagaagcacgaaagacacccgaucuucggaaacaucgucgacgaagucgcauaccacgaaaaguacccgacaaucuaccaccugagaaagaagcuggucgacagcacagacaaggcagaccugagacugaucuaccuggcacuggcacacaugaucaaguucagaggacacuuccugaucgaaggagaccugaacccggacaacagcgacgucgacaagcuguucauccagcugguccagacauacaaccagcuguucgaagaaaacccgaucaacgcaagcggagucgacgcaaaggcaauccugagcgcaagacugagcaagagcagaagacuggaaaaccugaucgcacagcugccgggagaaaagaagaacggacuguucggaaaccugaucgcacugagccugggacugacaccgaacuucaagagcaacuucgaccuggcagaagacgcaaagcugcagcugagcaaggacacauacgacgacgaccuggacaaccugcuggcacagaucggagaccaguacgcagaccuguuccuggcagcaaagaaccugagcgacgcaauccugcugagcgacauccugagagucaacacagaaaucacaaaggcaccgcugagcgcaagcaugaucaagagauacgacgaacaccaccaggaccugacacugcugaaggcacuggucagacagcagcugccggaaaaguacaaggaaaucuucuucgaccagagcaagaacggauacgcaggauacaucgacggaggagcaagccaggaagaauucuacaaguucaucaagccgauccuggaaaagauggacggaacagaagaacugcuggucaagcugaacagagaagaccugcugagaaagcagagaacauucgacaacggaagcaucccgcaccagauccaccugggagaacugcacgcaauccugagaagacaggaagacuucuacccguuccugaaggacaacagagaaaagaucgaaaagauccugacauucagaaucccguacuacgucggaccgcuggcaagaggaaacagcagauucgcauggaugacaagaaagagcgaagaaacaaucacaccguggaacuucgaagaagucgucgacaagggagcaagcgcacagagcuucaucgaaagaaugacaaacuucgacaagaaccugccgaacgaaaagguccugccgaagcacagccugcuguacgaauacuucacagucuacaacgaacugacaaaggucaaguacgucacagaaggaaugagaaagccggcauuccugagcggagaacagaagaaggcaaucgucgaccugcuguucaagacaaacagaaaggucacagucaagcagcugaaggaagacuacuucaagaagaucgaaugcuucgacagcgucgaaaucagcggagucgaagacagauucaacgcaagccugggaacauaccacgaccugcugaagaucaucaaggacaaggacuuccuggacaacgaagaaaacgaagacauccuggaagacaucguccugacacugacacuguucgaagacagagaaaugaucgaagaaagacugaagacauacgcacaccuguucgacgacaaggucaugaagcagcugaagagaagaagauacacaggauggggaagacugagcagaaagcugaucaacggaaucagagacaagcagagcggaaagacaauccuggacuuccugaagagcgacggauucgcaaacagaaacuucaugcagcugauccacgacgacagccugacauucaaggaagacauccagaaggcacaggucagcggacagggagacagccugcacgaacacaucgcaaaccuggcaggaagcccggcaaucaagaagggaauccugcagacagucaaggucgucgacgaacuggucaaggucaugggaagacacaagccggaaaacaucgucaucgaaauggcaagagaaaaccagacaacacagaagggacagaagaacagcagagaaagaaugaagagaaucgaagaaggaaucaaggaacugggaagccagauccugaaggaacacccggucgaaaacacacagcugcagaacgaaaagcuguaccuguacuaccugcagaacggaagagacauguacgucgaccaggaacuggacaucaacagacugagcgacuacgacgucgaccacaucgucccgcagagcuuccugaaggacgacagcaucgacaacaagguccugacaagaagcgacaagaacagaggaaagagcgacaacgucccgagcgaagaagucgucaagaagaugaagaacuacuggagacagcugcugaacgcaaagcugaucacacagagaaaguucgacaaccugacaaaggcagagagaggaggacugagcgaacuggacaaggcaggauucaucaagagacagcuggucgaaacaagacagaucacaaagcacgucgcacagauccuggacagcagaaugaacacaaaguacgacgaaaacgacaagcugaucagagaagucaaggucaucacacugaagagcaagcuggucagcgacuucagaaaggacuuccaguucuacaaggucagagaaaucaacaacuaccaccacgcacacgacgcauaccugaacgcagucgucggaacagcacugaucaagaaguacccgaagcuggaaagcgaauucgucuacggagacuacaaggucuacgacgucagaaagaugaucgcaaagagcgaacaggaaaucggaaaggcaacagcaaaguacuucuucuacagcaacaucaugaacuucuucaagacagaaaucacacuggcaaacggagaaaucagaaagagaccgcugaucgaaacaaacggagaaacaggagaaaucgucugggacaagggaagagacuucgcaacagucagaaagguccugagcaugccgcaggucaacaucgucaagaagacagaaguccagacaggaggauucagcaaggaaagcauccugccgaagagaaacagcgacaagcugaucgcaagaaagaaggacugggacccgaagaaguacggaggauucgacagcccgacagucgcauacagcguccuggucgucgcaaaggucgaaaagggaaagagcaagaagcugaagagcgucaaggaacugcugggaaucacaaucauggaaagaagcagcuucgaaaagaacccgaucgacuuccuggaagcaaagggauacaaggaagucaagaaggaccugaucaucaagcugccgaaguacagccuguucgaacuggaaaacggaagaaagagaaugcuggcaagcgcaggagaacugcagaagggaaacgaacuggcacugccgagcaaguacgucaacuuccuguaccuggcaagccacuacgaaaagcugaagggaagcccggaagacaacgaacagaagcagcuguucgucgaacagcacaagcacuaccuggacgaaaucaucgaacagaucagcgaauucagcaagagagucauccuggcagacgcaaaccuggacaagguccugagcgcauacaacaagcacagagacaagccgaucagagaacaggcagaaaacaucauccaccuguucacacugacaaaccugggagcaccggcagcauucaaguacuucgacacaacaaucgacagaaagagauacacaagcacaaaggaaguccuggacgcaacacugauccaccagagcaucacaggacuguacgaaacaagaaucgaccugagccagcugggaggagacggaggaggaagcccgaagaagaagagaaaggucuagcuagccaucacauuuaaaagcaucucagccuaccaugagaauaagagaaagaaaaugaagaucaauagcuuauucaucucuuuuucuuuuucguugguguaaagccaacacccugucuaaaaaacauaaauuucuuuaaucauuuugccucuuuucucugugcuucaauuaauaaaaaauggaaagaaccucgagaaaaaaaaaaaaaaaaaaaaaaaaaaaaaaaaaaaaaaaaaaaaaaaaaaaaaaaaaaaaaaaaaaaaaaaaaaaaaaaaaaaaaaaaaa

SEQ ID NO: 3500 - RNA, 4499 nt, Artificial Sequence
  Synthetic
gggucccgcagucggcguccagcggcucugcuuguucgugugugugucguugcaggccuuauucggauccauggauaagaaguacucaaucgggcuggauaucggaacuaauuccguggguugggcagugaucacggaugaauacaaagugccguccaagaaguucaagguccuggggaacaccgauagacacagcaucaagaaaaaucucaucggagcccugcuguuugacuccggcgaaaccgcagaagcgacccggcucaaacguaccgcgaggcgacgcuacacccggcggaagaaucgcaucugcuaucugcaagagaucuuuucgaacgaaauggcaaaggucgacgacagcuucuuccaccgccuggaagaaucuuuccugguggaggaggacaagaagcaugaacggcauccuaucuuuggaaacaucgucgacgaaguggcguaccacgaaaaguacccgaccaucuaccaucugcggaagaaguugguugacucaacugacaaggccgaccucagauugaucuacuuggcccucgcccauaugaucaaauuccgcggacacuuccugaucgaaggcgaucugaacccugauaacuccgacguggauaagcuuuucauucaacuggugcagaccuacaaccaacuguucgaagaaaacccaaucaaugcuagcggcgucgaugccaaggccauccuguccgcccggcugucgaagucgcggcgccucgaaaaccugaucgcacagcugccgggagagaaaaagaacggacuuuucggcaacuugaucgcucucucacugggacucacucccaauuucaaguccaauuuugaccuggccgaggacgcgaagcugcaacucucaaaggacaccuacgacgacgacuuggacaauuugcuggcacaaauuggcgaucaguacgcggaucuguuccuugccgcuaagaaccuuucggacgcaaucuugcuguccgauauccugcgcgugaacaccgaaauaaccaaagcgccgcuuagcgccucgaugauuaagcgguacgacgagcaucaccaggaucucacgcugcucaaagcgcucgugagacagcaacugccugaaaaguacaaggagaucuucuucgaccaguccaagaauggguacgcaggguacaucgauggaggcgcuagccaggaagaguucuauaaguucaucaagccaauccuggaaaagauggacggaaccgaagaacugcuggucaagcugaacagggaggaucugcuccggaaacagagaaccuuugacaacggauccauuccccaccagauccaucugggugagcugcacgccaucuugcggcgccaggaggacuuuuacccauuccucaaggacaaccgggaaaagaucgagaaaauucugacguuccgcaucccguauuacgugggcccacuggcgcgcggcaauucgcgcuucgcguggaugacuagaaaaucagaggaaaccaucacuccuuggaauuucgaggaaguuguggauaagggagcuucggcacaaagcuucaucgaacgaaugaccaacuucgacaagaaucucccaaacgagaaggugcuuccuaagcacagccuccuuuacgaauacuucacugucuacaacgaacugacuaaagugaaauacguuacugaaggaaugaggaagccggccuuucuguccggagaacagaagaaagcaauugucgaucugcuguucaagaccaaccgcaaggugaccgucaagcagcuuaaagaggacuacuucaagaagaucgaguguuucgacucaguggaaaucagcgggguggaggacagauucaacgcuucgcugggaaccuaucaugaucuccugaagaucaucaaggacaaggacuuccuugacaacgaggagaacgaggacauccuggaagauaucguccugaccuugacccuuuucgaggaucgcgagaugaucgaggagaggcuuaagaccuacgcucaucucuucgacgauaaggucaugaaacaacucaagcgccgccgguacacugguuggggccgccucucccgcaagcugaucaacgguauucgcgauaaacagagcgguaaaacuauccuggauuuccucaaaucggauggcuucgcuaaucguaacuucaugcaauugauccacgacgacagccugaccuuuaaggaggacauccaaaaagcacaaguguccggacagggagacucacuccaugaacacaucgcgaaucuggccgguucgccggcgauuaagaagggaauucugcaaacugugaagguggucgacgagcuggugaaggucaugggacggcacaaaccggagaauaucgugauugaaauggcccgagaaaaccagacuacccagaagggccagaaaaacucccgcgaaaggaugaagcggaucgaagaaggaaucaaggagcugggcagccagauccugaaagagcacccgguggaaaacacgcagcugcagaacgagaagcucuaccuguacuauuugcaaaauggacgggacauguacguggaccaagagcuggacaucaaucgguugucugauuacgacguggaccacaucguuccacaguccuuucugaaggaugacucgaucgauaacaagguguugacucgcagcgacaagaacagagggaagucagauaaugugccaucggaggaggucgugaagaagaugaagaauuacuggcggcagcuccugaaugcgaagcugauuacccagagaaaguuugacaaucucacuaaagccgagcgcggcggacucucagagcuggauaaggcuggauucaucaaacggcagcuggucgagacucggcagauuaccaagcacguggcgcagaucuuggacucccgcaugaacacuaaauacgacgagaacgauaagcucauccgggaagugaaggugauuacccugaaaagcaaacuugugucggacuuucggaaggacuuucaguuuuacaaagugagagaaaucaacaacuaccaucacgcgcaugacgcauaccucaacgcuguggucgguaccgcccugaucaaaaaguacccuaaacuugaaucggaguuuguguacggagacuacaaggucuacgacgugaggaagaugauagccaaguccgaacaggaaaucgggaaagcaacugcgaaauacuucuuuuacucaaacaucaugaacuuuuucaagacugaaauuacgcuggccaauggagaaaucaggaagaggccacugaucgaaacuaacggagaaacgggcgaaaucgugugggacaagggcagggacuucgcaacuguucgcaaagugcucucuaugccgcaagucaauauugugaagaaaaccgaagugcaaaccggcggauuuucaaaggaaucgauccucccaaagagaaauagcgacaagcucauugcacgcaagaaagacugggacccgaagaaguacggaggauucgauucgccgacugucgcauacuccguccucgugguggccaagguggagaagggaaagagcaaaaagcucaaauccgucaaagagcugcuggggauuaccaucauggaacgauccucguucgagaagaacccgauugauuuccucgaggcgaaggguuacaaggaggugaagaaggaucugaucaucaaacuccccaaguacucacuguucgaacuggaaaauggucggaagcgcaugcuggcuucggccggagaacuccaaaaaggaaaugagcuggccuugccuagcaaguacgucaacuuccucuaucuugcuucgcacuacgaaaaacucaaagggucaccggaagauaacgaacagaagcagcuuuucguggagcagcacaagcauuaucuggaugaaaucaucgaacaaaucuccgaguuuucaaagcgcgugauccucgccgacgccaaccucgacaaaguccugucggccuacaauaagcauagagauaagccgaucagagaacaggccgagaacauuauccacuuguucacccugacuaaccugggagccccagccgccuucaaguacuucgauacuacuaucgaucgcaaaagauacacguccaccaaggaaguucuggacgcgacccugauccaccaaagcaucacuggacucuacgaaacuaggaucgaucugucgcagcuggguggcgauggcgguggaucuccgaaaaagaagagaaagguguaaugagcuagccaucacauuuaaaagcaucucagccuaccaugagaauaagagaaagaaaaugaagaucaauagcuuauucaucucuuuuucuuuuucguugguguaaagccaacacccugucuaaaaaacauaaauuucuuuaaucauuuugccucuuuucucugugcuucaauuaauaaaaaauggaaagaaccucgagaaaaaaaaaaaaaaaaaaaaaaaaaaaaaaaaaaaaaaaaaaaaaaaaaaaaaaaaaaaaaaaaaaaaaaaaaaaaaaaaaaaaaaaaaa

SEQ ID NO: 3501 - DNA, 4411 bp, Artificial Sequence
  Synthetic
gggtcccgcagtcggcgtccagcggctctgcttgttcgtgtgtgtgtcgttgcaggccttattcggatccgccaccatggacaagaagtacagcatcggactggacatcggaacaaacagcgtcggatgggcagtcatcacagacgaatacaaggtcccgagcaagaagttcaaggtcctgggaaacacagacagacacagcatcaagaagaacctgatcggagcactgctgttcgacagcggagaaacagcagaagcaacaagactgaagagaacagcaagaagaagatacacaagaagaaagaacagaatctgctacctgcaggaaatcttcagcaacgaaatggcaaaggtcgacgacagcttcttccacagactggaagaaagcttcctggtcgaagaagacaagaagcacgaaagacacccgatcttcggaaacatcgtcgacgaagtcgcataccacgaaaagtacccgacaatctaccacctgagaaagaagctggtcgacagcacagacaaggcagacctgagactgatctacctggcactggcacacatgatcaagttcagaggacacttcctgatcgaaggagacctgaacccggacaacagcgacgtcgacaagctgttcatccagctggtccagacatacaaccagctgttcgaagaaaacccgatcaacgcaagcggagtcgacgcaaaggcaatcctgagcgcaagactgagcaagagcagaagactggaaaacctgatcgcacagctgccgggagaaaagaagaacggactgttcggaaacctgatcgcactgagcctgggactgacaccgaacttcaagagcaacttcgacctggcagaagacgcaaagctgcagctgagcaaggacacatacgacgacgacctggacaacctgctggcacagatcggagaccagtacgcagacctgttcctggcagcaaagaacctgagcgacgcaatcctgctgagcgacatcctgagagtcaacacagaaatcacaaaggcaccgctgagcgcaagcatgatcaagagatacgacgaacaccaccaggacctgacactgctgaaggcactggtcagacagcagctgccggaaaagtacaaggaaatcttcttcgaccagagcaagaacggatacgcaggatacatcgacggaggagcaagccaggaagaattctacaagttcatcaagccgatcctggaaaagatggacggaacagaagaactgctggtcaagctgaacagagaagacctgctgagaaagcagagaacattcgacaacggaagcatcccgcaccagatccacctgggagaactgcacgcaatcctgagaagacaggaagacttctacccgttcctgaaggacaacagagaaaagatcgaaaagatcctgacattcagaatcccgtactacgtcggaccgctggcaagaggaaacagcagattcgcatggatgacaagaaagagcgaagaaacaatcacaccgtggaacttcgaagaagtcgtcgacaagggagcaagcgcacagagcttcatcgaaagaatgacaaacttcgacaagaacctgccgaacgaaaaggtcctgccgaagcacagcctgctgtacgaatacttcacagtctacaacgaactgacaaaggtcaagtacgtcacagaaggaatgagaaagccggcattcctgagcggagaacagaagaaggcaatcgtcgacctgctgttcaagacaaacagaaaggtcacagtcaagcagctgaaggaagactacttcaagaagatcgaatgcttcgacagcgtcgaaatcagcggagtcgaagacagattcaacgcaagcctgggaacataccacgacctgctgaagatcatcaaggacaaggacttcctggacaacgaagaaaacgaagacatcctggaagacatcgtcctgacactgacactgttcgaagacagagaaatgatcgaagaaagactgaagacatacgcacacctgttcgacgacaaggtcatgaagcagctgaagagaagaagatacacaggatggggaagactgagcagaaagctgatcaacggaatcagagacaagcagagcggaaagacaatcctggacttcctgaagagcgacggattcgcaaacagaaacttcatgcagctgatccacgacgacagcctgacattcaaggaagacatccagaaggcacaggtcagcggacagggagacagcctgcacgaacacatcgcaaacctggcaggaagcccggcaatcaagaagggaatcctgcagacagtcaaggtcgtcgacgaactggtcaaggtcatgggaagacacaagccggaaaacatcgtcatcgaaatggcaagagaaaaccagacaacacagaagggacagaagaacagcagagaaagaatgaagagaatcgaagaaggaatcaaggaactgggaagccagatcctgaaggaacacccggtcgaaaacacacagctgcagaacgaaaagctgtacctgtactacctgcagaacggaagagacatgtacgtcgaccaggaactggacatcaacagactgagcgactacgacgtcgaccacatcgtcccgcagagcttcctgaaggacgacagcatcgacaacaaggtcctgacaagaagcgacaagaacagaggaaagagcgacaacgtcccgagcgaagaagtcgtcaagaagatgaagaactactggagacagctgctgaacgcaaagctgatcacacagagaaagttcgacaacctgacaaaggcagagagaggaggactgagcgaactggacaaggcaggattcatcaagagacagctggtcgaaacaagacagatcacaaagcacgtcgcacagatcctggacagcagaatgaacacaaagtacgacgaaaacgacaagctgatcagagaagtcaaggtcatcacactgaagagcaagctggtcagcgacttcagaaaggacttccagttctacaaggtcagagaaatcaacaactaccaccacgcacacgacgcatacctgaacgcagtcgtcggaacagcactgatcaagaagtacccgaagctggaaagcgaattcgtctacggagactacaaggtctacgacgtcagaaagatgatcgcaaagagcgaacaggaaatcggaaaggcaacagcaaagtacttcttctacagcaacatcatgaacttcttcaagacagaaatcacactggcaaacggagaaatcagaaagagaccgctgatcgaaacaaacggagaaacaggagaaatcgtctgggacaagggaagagacttcgcaacagtcagaaaggtcctgagcatgccgcaggtcaacatcgtcaagaagacagaagtccagacaggaggattcagcaaggaaagcatcctgccgaagagaaacagcgacaagctgatcgcaagaaagaaggactgggacccgaagaagtacggaggattcgacagcccgacagtcgcatacagcgtcctggtcgtcgcaaaggtcgaaaagggaaagagcaagaagctgaagagcgtcaaggaactgctgggaatcacaatcatggaaagaagcagcttcgaaaagaacccgatcgacttcctggaagcaaagggatacaaggaagtcaagaaggacctgatcatcaagctgccgaagtacagcctgttcgaactggaaaacggaagaaagagaatgctggcaagcgcaggagaactgcagaagggaaacgaactggcactgccgagcaagtacgtcaacttcctgtacctggcaagccactacgaaaagctgaagggaagcccggaagacaacgaacagaagcagctgttcgtcgaacagcacaagcactacctggacgaaatcatcgaacagatcagcgaattcagcaagagagtcatcctggcagacgcaaacctggacaaggtcctgagcgcatacaacaagcacagagacaagccgatcagagaacaggcagaaaacatcatccacctgttcacactgacaaacctgggagcaccggcagcattcaagtacttcgacacaacaatcgacagaaagagatacacaagcacaaaggaagtcctggacgcaacactgatccaccagagcatcacaggactgtacgaaacaagaatcgacctgagccagctgggaggagacggaggaggaagcccgaagaagaagagaaaggtctagctagccatcacatttaaaagcatctcagcctaccatgagaataagagaaagaaaatgaagatcaatagcttattcatctctttttctttttcgttggtgtaaagccaacaccctgtctaaaaaacataaatttctttaatcattttgcctcttttctctgtgcttcaattaataaaaaatggaaagaacctcgag

SEQ ID NO: 3502 - DNA, 4140 bp, Artificial Sequence
  Synthetic
atggacaagaagtacagcatcggactggacatcggaacaaacagcgtcggatgggcagtcatcacagacgaatacaaggtcccgagcaagaagttcaaggtcctgggaaacacagacagacacagcatcaagaagaacctgatcggagcactgctgttcgacagcggagaaacagcagaagcaacaagactgaagagaacagcaagaagaagatacacaagaagaaagaacagaatctgctacctgcaggaaatcttcagcaacgaaatggcaaaggtcgacgacagcttcttccacagactggaagaaagcttcctggtcgaagaagacaagaagcacgaaagacacccgatcttcggaaacatcgtcgacgaagtcgcataccacgaaaagtacccgacaatctaccacctgagaaagaagctggtcgacagcacagacaaggcagacctgagactgatctacctggcactggcacacatgatcaagttcagaggacacttcctgatcgaaggagacctgaacccggacaacagcgacgtcgacaagctgttcatccagctggtccagacatacaaccagctgttcgaagaaaacccgatcaacgcaagcggagtcgacgcaaaggcaatcctgagcgcaagactgagcaagagcagaagactggaaaacctgatcgcacagctgccgggagaaaagaagaacggactgttcggaaacctgatcgcactgagcctgggactgacaccgaacttcaagagcaacttcgacctggcagaagacgcaaagctgcagctgagcaaggacacatacgacgacgacctggacaacctgctggcacagatcggagaccagtacgcagacctgttcctggcagcaaagaacctgagcgacgcaatcctgctgagcgacatcctgagagtcaacacagaaatcacaaaggcaccgctgagcgcaagcatgatcaagagatacgacgaacaccaccaggacctgacactgctgaaggcactggtcagacagcagctgccggaaaagtacaaggaaatcttcttcgaccagagcaagaacggatacgcaggatacatcgacggaggagcaagccaggaagaattctacaagttcatcaagccgatcctggaaaagatggacggaacagaagaactgctggtcaagctgaacagagaagacctgctgagaaagcagagaacattcgacaacggaagcatcccgcaccagatccacctgggagaactgcacgcaatcctgagaagacaggaagacttctacccgttcctgaaggacaacagagaaaagatcgaaaagatcctgacattcagaatcccgtactacgtcggaccgctggcaagaggaaacagcagattcgcatggatgacaagaaagagcgaagaaacaatcacaccgtggaacttcgaagaagtcgtcgacaagggagcaagcgcacagagcttcatcgaaagaatgacaaacttcgacaagaacctgccgaacgaaaaggtcctgccgaagcacagcctgctgtacgaatacttcacagtctacaacgaactgacaaaggtcaagtacgtcacagaaggaatgagaaagccggcattcctgagcggagaacagaagaaggcaatcgtcgacctgctgttcaagacaaacagaaaggtcacagtcaagcagctgaaggaagactacttcaagaagatcgaatgcttcgacagcgtcgaaatcagcggagtcgaagacagattcaacgcaagcctgggaacataccacgacctgctgaagatcatcaaggacaaggacttcctggacaacgaagaaaacgaagacatcctggaagacatcgtcctgacactgacactgttcgaagacagagaaatgatcgaagaaagactgaagacatacgcacacctgttcgacgacaaggtcatgaagcagctgaagagaagaagatacacaggatggggaagactgagcagaaagctgatcaacggaatcagagacaagcagagcggaaagacaatcctggacttcctgaagagcgacggattcgcaaacagaaacttcatgcagctgatccacgacgacagcctgacattcaaggaagacatccagaaggcacaggtcagcggacagggagacagcctgcacgaacacatcgcaaacctggcaggaagcccggcaatcaagaagggaatcctgcagacagtcaaggtcgtcgacgaactggtcaaggtcatgggaagacacaagccggaaaacatcgtcatcgaaatggcaagagaaaaccagacaacacagaagggacagaagaacagcagagaaagaatgaagagaatcgaagaaggaatcaaggaactgggaagccagatcctgaaggaacacccggtcgaaaacacacagctgcagaacgaaaagctgtacctgtactacctgcagaacggaagagacatgtacgtcgaccaggaactggacatcaacagactgagcgactacgacgtcgaccacatcgtcccgcagagcttcctgaaggacgacagcatcgacaacaaggtcctgacaagaagcgacaagaacagaggaaagagcgacaacgtcccgagcgaagaagtcgtcaagaagatgaagaactactggagacagctgctgaacgcaaagctgatcacacagagaaagttcgacaacctgacaaaggcagagagaggaggactgagcgaactggacaaggcaggattcatcaagagacagctggtcgaaacaagacagatcacaaagcacgtcgcacagatcctggacagcagaatgaacacaaagtacgacgaaaacgacaagctgatcagagaagtcaaggtcatcacactgaagagcaagctggtcagcgacttcagaaaggacttccagttctacaaggtcagagaaatcaacaactaccaccacgcacacgacgcatacctgaacgcagtcgtcggaacagcactgatcaagaagtacccgaagctggaaagcgaattcgtctacggagactacaaggtctacgacgtcagaaagatgatcgcaaagagcgaacaggaaatcggaaaggcaacagcaaagtacttcttctacagcaacatcatgaacttcttcaagacagaaatcacactggcaaacggagaaatcagaaagagaccgctgatcgaaacaaacggagaaacaggagaaatcgtctgggacaagggaagagacttcgcaacagtcagaaaggtcctgagcatgccgcaggtcaacatcgtcaagaagacagaagtccagacaggaggattcagcaaggaaagcatcctgccgaagagaaacagcgacaagctgatcgcaagaaagaaggactgggacccgaagaagtacggaggattcgacagcccgacagtcgcatacagcgtcctggtcgtcgcaaaggtcgaaaagggaaagagcaagaagctgaagagcgtcaaggaactgctgggaatcacaatcatggaaagaagcagcttcgaaaagaacccgatcgacttcctggaagcaaagggatacaaggaagtcaagaaggacctgatcatcaagctgccgaagtacagcctgttcgaactggaaaacggaagaaagagaatgctggcaagcgcaggagaactgcagaagggaaacgaactggcactgccgagcaagtacgtcaacttcctgtacctggcaagccactacgaaaagctgaagggaagcccggaagacaacgaacagaagcagctgttcgtcgaacagcacaagcactacctggacgaaatcatcgaacagatcagcgaattcagcaagagagtcatcctggcagacgcaaacctggacaaggtcctgagcgcatacaacaagcacagagacaagccgatcagagaacaggcagaaaacatcatccacctgttcacactgacaaacctgggagcaccggcagcattcaagtacttcgacacaacaatcgacagaaagagatacacaagcacaaaggaagtcctggacgcaacactgatccaccagagcatcacaggactgtacgaaacaagaatcgacctgagccagctgggaggagacggaggaggaagcccgaagaagaagagaaaggtctag

SEQ ID NO: 3503 - DNA, 4143 bp, Artificial Sequence
  Synthetic
atggataagaagtactcaatcgggctggatatcggaactaattccgtgggttgggcagtgatcacggatgaatacaaagtgccgtccaagaagttcaaggtcctggggaacaccgatagacacagcatcaagaaaaatctcatcggagccctgctgtttgactccggcgaaaccgcagaagcgacccggctcaaacgtaccgcgaggcgacgctacacccggcggaagaatcgcatctgctatctgcaagagatcttttcgaacgaaatggcaaaggtcgacgacagcttcttccaccgcctggaagaatctttcctggtggaggaggacaagaagcatgaacggcatcctatctttggaaacatcgtcgacgaagtggcgtaccacgaaaagtacccgaccatctaccatctgcggaagaagttggttgactcaactgacaaggccgacctcagattgatctacttggccctcgcccatatgatcaaattccgcggacacttcctgatcgaaggcgatctgaaccctgataactccgacgtggataagcttttcattcaactggtgcagacctacaaccaactgttcgaagaaaacccaatcaatgctagcggcgtcgatgccaaggccatcctgtccgcccggctgtcgaagtcgcggcgcctcgaaaacctgatcgcacagctgccgggagagaaaaagaacggacttttcggcaacttgatcgctctctcactgggactcactcccaatttcaagtccaattttgacctggccgaggacgcgaagctgcaactctcaaaggacacctacgacgacgacttggacaatttgctggcacaaattggcgatcagtacgcggatctgttccttgccgctaagaacctttcggacgcaatcttgctgtccgatatcctgcgcgtgaacaccgaaataaccaaagcgccgcttagcgcctcgatgattaagcggtacgacgagcatcaccaggatctcacgctgctcaaagcgctcgtgagacagcaactgcctgaaaagtacaaggagatcttcttcgaccagtccaagaatgggtacgcagggtacatcgatggaggcgctagccaggaagagttctataagttcatcaagccaatcctggaaaagatggacggaaccgaagaactgctggtcaagctgaacagggaggatctgctccggaaacagagaacctttgacaacggatccattccccaccagatccatctgggtgagctgcacgccatcttgcggcgccaggaggacttttacccattcctcaaggacaaccgggaaaagatcgagaaaattctgacgttccgcatcccgtattacgtgggcccactggcgcgcggcaattcgcgcttcgcgtggatgactagaaaatcagaggaaaccatcactccttggaatttcgaggaagttgtggataagggagcttcggcacaaagcttcatcgaacgaatgaccaacttcgacaagaatctcccaaacgagaaggtgcttcctaagcacagcctcctttacgaatacttcactgtctacaacgaactgactaaagtgaaatacgttactgaaggaatgaggaagccggcctttctgtccggagaacagaagaaagcaattgtcgatctgctgttcaagaccaaccgcaaggtgaccgtcaagcagcttaaagaggactacttcaagaagatcgagtgtttcgactcagtggaaatcagcggggtggaggacagattcaacgcttcgctgggaacctatcatgatctcctgaagatcatcaaggacaaggacttccttgacaacgaggagaacgaggacatcctggaagatatcgtcctgaccttgacccttttcgaggatcgcgagatgatcgaggagaggcttaagacctacgctcatctcttcgacgataaggtcatgaaacaactcaagcgccgccggtacactggttggggccgcctctcccgcaagctgatcaacggtattcgcgataaacagagcggtaaaactatcctggatttcctcaaatcggatggcttcgctaatcgtaacttcatgcaattgatccacgacgacagcctgacctttaaggaggacatccaaaaagcacaagtgtccggacagggagactcactccatgaacacatcgcgaatctggccggttcgccggcgattaagaagggaattctgcaaactgtgaaggtggtcgacgagctggtgaaggtcatgggacggcacaaaccggagaatatcgtgattgaaatggcccgagaaaaccagactacccagaagggccagaaaaactcccgcgaaaggatgaagcggatcgaagaaggaatcaaggagctgggcagccagatcctgaaagagcacccggtggaaaacacgcagctgcagaacgagaagctctacctgtactatttgcaaaatggacgggacatgtacgtggaccaagagctggacatcaatcggttgtctgattacgacgtggaccacatcgttccacagtcctttctgaaggatgactcgatcgataacaaggtgttgactcgcagcgacaagaacagagggaagtcagataatgtgccatcggaggaggtcgtgaagaagatgaagaattactggcggcagctcctgaatgcgaagctgattacccagagaaagtttgacaatctcactaaagccgagcgcggcggactctcagagctggataaggctggattcatcaaacggcagctggtcgagactcggcagattaccaagcacgtggcgcagatcttggactcccgcatgaacactaaatacgacgagaacgataagctcatccgggaagtgaaggtgattaccctgaaaagcaaacttgtgtcggactttcggaaggactttcagttttacaaagtgagagaaatcaacaactaccatcacgcgcatgacgcatacctcaacgctgtggtcggtaccgccctgatcaaaaagtaccctaaacttgaatcggagtttgtgtacggagactacaaggtctacgacgtgaggaagatgatagccaagtccgaacaggaaatcgggaaagcaactgcgaaatacttcttttactcaaacatcatgaactttttcaagactgaaattacgctggccaatggagaaatcaggaagaggccactgatcgaaactaacggagaaacgggcgaaatcgtgtgggacaagggcagggacttcgcaactgttcgcaaagtgctctctatgccgcaagtcaatattgtgaagaaaaccgaagtgcaaaccggcggattttcaaaggaatcgatcctcccaaagagaaatagcgacaagctcattgcacgcaagaaagactgggacccgaagaagtacggaggattcgattcgccgactgtcgcatactccgtcctcgtggtggccaaggtggagaagggaaagagcaaaaagctcaaatccgtcaaagagctgctggggattaccatcatggaacgatcctcgttcgagaagaacccgattgatttcctcgaggcgaagggttacaaggaggtgaagaaggatctgatcatcaaactccccaagtactcactgttcgaactggaaaatggtcggaagcgcatgctggcttcggccggagaactccaaaaaggaaatgagctggccttgcctagcaagtacgtcaacttcctctatcttgcttcgcactacgaaaaactcaaagggtcaccggaagataacgaacagaagcagcttttcgtggagcagcacaagcattatctggatgaaatcatcgaacaaatctccgagttttcaaagcgcgtgatcctcgccgacgccaacctcgacaaagtcctgtcggcctacaataagcatagagataagccgatcagagaacaggccgagaacattatccacttgttcaccctgactaacctgggagccccagccgccttcaagtacttcgatactactatcgatcgcaaaagatacacgtccaccaaggaagttctggacgcgaccctgatccaccaaagcatcactggactctacgaaactaggatcgatctgtcgcagctgggtggcgatggcggtggatctccgaaaaagaagagaaaggtgtaatga

SEQ ID NO: 3504 - RNA, 4140 nt, Artificial Sequence
  Synthetic
auggacaagaaguacagcaucggacuggacaucggaacaaacagcgucggaugggcagucaucacagacgaauacaaggucccgagcaagaaguucaagguccugggaaacacagacagacacagcaucaagaagaaccugaucggagcacugcuguucgacagcggagaaacagcagaagcaacaagacugaagagaacagcaagaagaagauacacaagaagaaagaacagaaucugcuaccugcaggaaaucuucagcaacgaaauggcaaaggucgacgacagcuucuuccacagacuggaagaaagcuuccuggucgaagaagacaagaagcacgaaagacacccgaucuucggaaacaucgucgacgaagucgcauaccacgaaaaguacccgacaaucuaccaccugagaaagaagcuggucgacagcacagacaaggcagaccugagacugaucuaccuggcacuggcacacaugaucaaguucagaggacacuuccugaucgaaggagaccugaacccggacaacagcgacgucgacaagcuguucauccagcugguccagacauacaaccagcuguucgaagaaaacccgaucaacgcaagcggagucgacgcaaaggcaauccugagcgcaagacugagcaagagcagaagacuggaaaaccugaucgcacagcugccgggagaaaagaagaacggacuguucggaaaccugaucgcacugagccugggacugacaccgaacuucaagagcaacuucgaccuggcagaagacgcaaagcugcagcugagcaaggacacauacgacgacgaccuggacaaccugcuggcacagaucggagaccaguacgcagaccuguuccuggcagcaaagaaccugagcgacgcaauccugcugagcgacauccugagagucaacacagaaaucacaaaggcaccgcugagcgcaagcaugaucaagagauacgacgaacaccaccaggaccugacacugcugaaggcacuggucagacagcagcugccggaaaaguacaaggaaaucuucuucgaccagagcaagaacggauacgcaggauacaucgacggaggagcaagccaggaagaauucuacaaguucaucaagccgauccuggaaaagauggacggaacagaagaacugcuggucaagcugaacagagaagaccugcugagaaagcagagaacauucgacaacggaagcaucccgcaccagauccaccugggagaacugcacgcaauccugagaagacaggaagacuucuacccguuccugaaggacaacagagaaaagaucgaaaagauccugacauucagaaucccguacuacgucggaccgcuggcaagaggaaacagcagauucgcauggaugacaagaaagagcgaagaaacaaucacaccguggaacuucgaagaagucgucgacaagggagcaagcgcacagagcuucaucgaaagaaugacaaacuucgacaagaaccugccgaacgaaaagguccugccgaagcacagccugcuguacgaauacuucacagucuacaacgaacugacaaaggucaaguacgucacagaaggaaugagaaagccggcauuccugagcggagaacagaagaaggcaaucgucgaccugcuguucaagacaaacagaaaggucacagucaagcagcugaaggaagacuacuucaagaagaucgaaugcuucgacagcgucgaaaucagcggagucgaagacagauucaacgcaagccugggaacauaccacgaccugcugaagaucaucaaggacaaggacuuccuggacaacgaagaaaacgaagacauccuggaagacaucguccugacacugacacuguucgaagacagagaaaugaucgaagaaagacugaagacauacgcacaccuguucgacgacaaggucaugaagcagcugaagagaagaagauacacaggauggggaagacugagcagaaagcugaucaacggaaucagagacaagcagagcggaaagacaauccuggacuuccugaagagcgacggauucgcaaacagaaacuucaugcagcugauccacgacgacagccugacauucaaggaagacauccagaaggcacaggucagcggacagggagacagccugcacgaacacaucgcaaaccuggcaggaagcccggcaaucaagaagggaauccugcagacagucaaggucgucgacgaacuggucaaggucaugggaagacacaagccggaaaacaucgucaucgaaauggcaagagaaaaccagacaacacagaagggacagaagaacagcagagaaagaaugaagagaaucgaagaaggaaucaaggaacugggaagccagauccugaaggaacacccggucgaaaacacacagcugcagaacgaaaagcuguaccuguacuaccugcagaacggaagagacauguacgucgaccaggaacuggacaucaacagacugagcgacuacgacgucgaccacaucgucccgcagagcuuccugaaggacgacagcaucgacaacaagguccugacaagaagcgacaagaacagaggaaagagcgacaacgucccgagcgaagaagucgucaagaagaugaagaacuacuggagacagcugcugaacgcaaagcugaucacacagagaaaguucgacaaccugacaaaggcagagagaggaggacugagcgaacuggacaaggcaggauucaucaagagacagcuggucgaaacaagacagaucacaaagcacgucgcacagauccuggacagcagaaugaacacaaaguacgacgaaaacgacaagcugaucagagaagucaaggucaucacacugaagagcaagcuggucagcgacuucagaaaggacuuccaguucuacaaggucagagaaaucaacaacuaccaccacgcacacgacgcauaccugaacgcagucgucggaacagcacugaucaagaaguacccgaagcuggaaagcgaauucgucuacggagacuacaaggucuacgacgucagaaagaugaucgcaaagagcgaacaggaaaucggaaaggcaacagcaaaguacuucuucuacagcaacaucaugaacuucuucaagacagaaaucacacuggcaaacggagaaaucagaaagagaccgcugaucgaaacaaacggagaaacaggagaaaucgucugggacaagggaagagacuucgcaacagucagaaagguccugagcaugccgcaggucaacaucgucaagaagacagaaguccagacaggaggauucagcaaggaaagcauccugccgaagagaaacagcgacaagcugaucgcaagaaagaaggacugggacccgaagaaguacggaggauucgacagcccgacagucgcauacagcguccuggucgucgcaaaggucgaaaagggaaagagcaagaagcugaagagcgucaaggaacugcugggaaucacaaucauggaaagaagcagcuucgaaaagaacccgaucgacuuccuggaagcaaagggauacaaggaagucaagaaggaccugaucaucaagcugccgaaguacagccuguucgaacuggaaaacggaagaaagagaaugcuggcaagcgcaggagaacugcagaagggaaacgaacuggcacugccgagcaaguacgucaacuuccuguaccuggcaagccacuacgaaaagcugaagggaagcccggaagacaacgaacagaagcagcuguucgucgaacagcacaagcacuaccuggacgaaaucaucgaacagaucagcgaauucagcaagagagucauccuggcagacgcaaaccuggacaagguccugagcgcauacaacaagcacagagacaagccgaucagagaacaggcagaaaacaucauccaccuguucacacugacaaaccugggagcaccggcagcauucaaguacuucgacacaacaaucgacagaaagagauacacaagcacaaaggaaguccuggacgcaacacugauccaccagagcaucacaggacuguacgaaacaagaaucgaccugagccagcugggaggagacggaggaggaagcccgaagaagaagagaaaggucuag

SEQ ID NO: 3505 - RNA, 4143 nt, Artificial Sequence
  Synthetic
auggauaagaaguacucaaucgggcuggauaucggaacuaauuccguggguugggcagugaucacggaugaauacaaagugccguccaagaaguucaagguccuggggaacaccgauagacacagcaucaagaaaaaucucaucggagcccugcuguuugacuccggcgaaaccgcagaagcgacccggcucaaacguaccgcgaggcgacgcuacacccggcggaagaaucgcaucugcuaucugcaagagaucuuuucgaacgaaauggcaaaggucgacgacagcuucuuccaccgccuggaagaaucuuuccugguggaggaggacaagaagcaugaacggcauccuaucuuuggaaacaucgucgacgaaguggcguaccacgaaaaguacccgaccaucuaccaucugcggaagaaguugguugacucaacugacaaggccgaccucagauugaucuacuuggcccucgcccauaugaucaaauuccgcggacacuuccugaucgaaggcgaucugaacccugauaacuccgacguggauaagcuuuucauucaacuggugcagaccuacaaccaacuguucgaagaaaacccaaucaaugcuagcggcgucgaugccaaggccauccuguccgcccggcugucgaagucgcggcgccucgaaaaccugaucgcacagcugccgggagagaaaaagaacggacuuuucggcaacuugaucgcucucucacugggacucacucccaauuucaaguccaauuuugaccuggccgaggacgcgaagcugcaacucucaaaggacaccuacgacgacgacuuggacaauuugcuggcacaaauuggcgaucaguacgcggaucuguuccuugccgcuaagaaccuuucggacgcaaucuugcuguccgauauccugcgcgugaacaccgaaauaaccaaagcgccgcuuagcgccucgaugauuaagcgguacgacgagcaucaccaggaucucacgcugcucaaagcgcucgugagacagcaacugccugaaaaguacaaggagaucuucuucgaccaguccaagaauggguacgcaggguacaucgauggaggcgcuagccaggaagaguucuauaaguucaucaagccaauccuggaaaagauggacggaaccgaagaacugcuggucaagcugaacagggaggaucugcuccggaaacagagaaccuuugacaacggauccauuccccaccagauccaucugggugagcugcacgccaucuugcggcgccaggaggacuuuuacccauuccucaaggacaaccgggaaaagaucgagaaaauucugacguuccgcaucccguauuacgugggcccacuggcgcgcggcaauucgcgcuucgcguggaugacuagaaaaucagaggaaaccaucacuccuuggaauuucgaggaaguuguggauaagggagcuucggcacaaagcuucaucgaacgaaugaccaacuucgacaagaaucucccaaacgagaaggugcuuccuaagcacagccuccuuuacgaauacuucacugucuacaacgaacugacuaaagugaaauacguuacugaaggaaugaggaagccggccuuucuguccggagaacagaagaaagcaauugucgaucugcuguucaagaccaaccgcaaggugaccgucaagcagcuuaaagaggacuacuucaagaagaucgaguguuucgacucaguggaaaucagcgggguggaggacagauucaacgcuucgcugggaaccuaucaugaucuccugaagaucaucaaggacaaggacuuccuugacaacgaggagaacgaggacauccuggaagauaucguccugaccuugacccuuuucgaggaucgcgagaugaucgaggagaggcuuaagaccuacgcucaucucuucgacgauaaggucaugaaacaacucaagcgccgccgguacacugguuggggccgccucucccgcaagcugaucaacgguauucgcgauaaacagagcgguaaaacuauccuggauuuccucaaaucggauggcuucgcuaaucguaacuucaugcaauugauccacgacgacagccugaccuuuaaggaggacauccaaaaagcacaaguguccggacagggagacucacuccaugaacacaucgcgaaucuggccgguucgccggcgauuaagaagggaauucugcaaacugugaagguggucgacgagcuggugaaggucaugggacggcacaaaccggagaauaucgugauugaaauggcccgagaaaaccagacuacccagaagggccagaaaaacucccgcgaaaggaugaagcggaucgaagaaggaaucaaggagcugggcagccagauccugaaagagcacccgguggaaaacacgcagcugcagaacgagaagcucuaccuguacuauuugcaaaauggacgggacauguacguggaccaagagcuggacaucaaucgguugucugauuacgacguggaccacaucguuccacaguccuuucugaaggaugacucgaucgauaacaagguguugacucgcagcgacaagaacagagggaagucagauaaugugccaucggaggaggucgugaagaagaugaagaauuacuggcggcagcuccugaaugcgaagcugauuacccagagaaaguuugacaaucucacuaaagccgagcgcggcggacucucagagcuggauaaggcuggauucaucaaacggcagcuggucgagacucggcagauuaccaagcacguggcgcagaucuuggacucccgcaugaacacuaaauacgacgagaacgauaagcucauccgggaagugaaggugauuacccugaaaagcaaacuugugucggacuuucggaaggacuuucaguuuuacaaagugagagaaaucaacaacuaccaucacgcgcaugacgcauaccucaacgcuguggucgguaccgcccugaucaaaaaguacccuaaacuugaaucggaguuuguguacggagacuacaaggucuacgacgugaggaagaugauagccaaguccgaacaggaaaucgggaaagcaacugcgaaauacuucuuuuacucaaacaucaugaacuuuuucaagacugaaauuacgcuggccaauggagaaaucaggaagaggccacugaucgaaacuaacggagaaacgggcgaaaucgugugggacaagggcagggacuucgcaacuguucgcaaagugcucucuaugccgcaagucaauauugugaagaaaaccgaagugcaaaccggcggauuuucaaaggaaucgauccucccaaagagaaauagcgacaagcucauugcacgcaagaaagacugggacccgaagaaguacggaggauucgauucgccgacugucgcauacuccguccucgugguggccaagguggagaagggaaagagcaaaaagcucaaauccgucaaagagcugcuggggauuaccaucauggaacgauccucguucgagaagaacccgauugauuuccucgaggcgaaggguuacaaggaggugaagaaggaucugaucaucaaacuccccaaguacucacuguucgaacuggaaaauggucggaagcgcaugcuggcuucggccggagaacuccaaaaaggaaaugagcuggccuugccuagcaaguacgucaacuuccucuaucuugcuucgcacuacgaaaaacucaaagggucaccggaagauaacgaacagaagcagcuuuucguggagcagcacaagcauuaucuggaugaaaucaucgaacaaaucuccgaguuuucaaagcgcgugauccucgccgacgccaaccucgacaaaguccugucggccuacaauaagcauagagauaagccgaucagagaacaggccgagaacauuauccacuuguucacccugacuaaccugggagccccagccgccuucaaguacuucgauacuacuaucgaucgcaaaagauacacguccaccaaggaaguucuggacgcgacccugauccaccaaagcaucacuggacucuacgaaacuaggaucgaucugucgcagcuggguggcgauggcgguggaucuccgaaaaagaagagaaagguguaauga

SEQ ID NO: 3506 - RNA, 4140 nt, Artificial Sequence
  Synthetic
auggacaagaaguacagcaucggacuggcaaucggaacaaacagcgucggaugggcagucaucacagacgaauacaaggucccgagcaagaaguucaagguccugggaaacacagacagacacagcaucaagaagaaccugaucggagcacugcuguucgacagcggagaaacagcagaagcaacaagacugaagagaacagcaagaagaagauacacaagaagaaagaacagaaucugcuaccugcaggaaaucuucagcaacgaaauggcaaaggucgacgacagcuucuuccacagacuggaagaaagcuuccuggucgaagaagacaagaagcacgaaagacacccgaucuucggaaacaucgucgacgaagucgcauaccacgaaaaguacccgacaaucuaccaccugagaaagaagcuggucgacagcacagacaaggcagaccugagacugaucuaccuggcacuggcacacaugaucaaguucagaggacacuuccugaucgaaggagaccugaacccggacaacagcgacgucgacaagcuguucauccagcugguccagacauacaaccagcuguucgaagaaaacccgaucaacgcaagcggagucgacgcaaaggcaauccugagcgcaagacugagcaagagcagaagacuggaaaaccugaucgcacagcugccgggagaaaagaagaacggacuguucggaaaccugaucgcacugagccugggacugacaccgaacuucaagagcaacuucgaccuggcagaagacgcaaagcugcagcugagcaaggacacauacgacgacgaccuggacaaccugcuggcacagaucggagaccaguacgcagaccuguuccuggcagcaaagaaccugagcgacgcaauccugcugagcgacauccugagagucaacacagaaaucacaaaggcaccgcugagcgcaagcaugaucaagagauacgacgaacaccaccaggaccugacacugcugaaggcacuggucagacagcagcugccggaaaaguacaaggaaaucuucuucgaccagagcaagaacggauacgcaggauacaucgacggaggagcaagccaggaagaauucuacaaguucaucaagccgauccuggaaaagauggacggaacagaagaacugcuggucaagcugaacagagaagaccugcugagaaagcagagaacauucgacaacggaagcaucccgcaccagauccaccugggagaacugcacgcaauccugagaagacaggaagacuucuacccguuccugaaggacaacagagaaaagaucgaaaagauccugacauucagaaucccguacuacgucggaccgcuggcaagaggaaacagcagauucgcauggaugacaagaaagagcgaagaaacaaucacaccguggaacuucgaagaagucgucgacaagggagcaagcgcacagagcuucaucgaaagaaugacaaacuucgacaagaaccugccgaacgaaaagguccugccgaagcacagccugcuguacgaauacuucacagucuacaacgaacugacaaaggucaaguacgucacagaaggaaugagaaagccggcauuccugagcggagaacagaagaaggcaaucgucgaccugcuguucaagacaaacagaaaggucacagucaagcagcugaaggaagacuacuucaagaagaucgaaugcuucgacagcgucgaaaucagcggagucgaagacagauucaacgcaagccugggaacauaccacgaccugcugaagaucaucaaggacaaggacuuccuggacaacgaagaaaacgaagacauccuggaagacaucguccugacacugacacuguucgaagacagagaaaugaucgaagaaagacugaagacauacgcacaccuguucgacgacaaggucaugaagcagcugaagagaagaagauacacaggauggggaagacugagcagaaagcugaucaacggaaucagagacaagcagagcggaaagacaauccuggacuuccugaagagcgacggauucgcaaacagaaacuucaugcagcugauccacgacgacagccugacauucaaggaagacauccagaaggcacaggucagcggacagggagacagccugcacgaacacaucgcaaaccuggcaggaagcccggcaaucaagaagggaauccugcagacagucaaggucgucgacgaacuggucaaggucaugggaagacacaagccggaaaacaucgucaucgaaauggcaagagaaaaccagacaacacagaagggacagaagaacagcagagaaagaaugaagagaaucgaagaaggaaucaaggaacugggaagccagauccugaaggaacacccggucgaaaacacacagcugcagaacgaaaagcuguaccuguacuaccugcagaacggaagagacauguacgucgaccaggaacuggacaucaacagacugagcgacuacgacgucgaccacaucgucccgcagagcuuccugaaggacgacagcaucgacaacaagguccugacaagaagcgacaagaacagaggaaagagcgacaacgucccgagcgaagaagucgucaagaagaugaagaacuacuggagacagcugcugaacgcaaagcugaucacacagagaaaguucgacaaccugacaaaggcagagagaggaggacugagcgaacuggacaaggcaggauucaucaagagacagcuggucgaaacaagacagaucacaaagcacgucgcacagauccuggacagcagaaugaacacaaaguacgacgaaaacgacaagcugaucagagaagucaaggucaucacacugaagagcaagcuggucagcgacuucagaaaggacuuccaguucuacaaggucagagaaaucaacaacuaccaccacgcacacgacgcauaccugaacgcagucgucggaacagcacugaucaagaaguacccgaagcuggaaagcgaauucgucuacggagacuacaaggucuacgacgucagaaagaugaucgcaaagagcgaacaggaaaucggaaaggcaacagcaaaguacuucuucuacagcaacaucaugaacuucuucaagacagaaaucacacuggcaaacggagaaaucagaaagagaccgcugaucgaaacaaacggagaaacaggagaaaucgucugggacaagggaagagacuucgcaacagucagaaagguccugagcaugccgcaggucaacaucgucaagaagacagaaguccagacaggaggauucagcaaggaaagcauccugccgaagagaaacagcgacaagcugaucgcaagaaagaaggacugggacccgaagaaguacggaggauucgacagcccgacagucgcauacagcguccuggucgucgcaaaggucgaaaagggaaagagcaagaagcugaagagcgucaaggaacugcugggaaucacaaucauggaaagaagcagcuucgaaaagaacccgaucgacuuccuggaagcaaagggauacaaggaagucaagaaggaccugaucaucaagcugccgaaguacagccuguucgaacuggaaaacggaagaaagagaaugcuggcaagcgcaggagaacugcagaagggaaacgaacuggcacugccgagcaaguacgucaacuuccuguaccuggcaagccacuacgaaaagcugaagggaagcccggaagacaacgaacagaagcagcuguucgucgaacagcacaagcacuaccuggacgaaaucaucgaacagaucagcgaauucagcaagagagucauccuggcagacgcaaaccuggacaagguccugagcgcauacaacaagcacagagacaagccgaucagagaacaggcagaaaacaucauccaccuguucacacugacaaaccugggagcaccggcagcauucaaguacuucgacacaacaaucgacagaaagagauacacaagcacaaaggaaguccuggacgcaacacugauccaccagagcaucacaggacuguacgaaacaagaaucgaccugagccagcugggaggagacggaggaggaagcccgaagaagaagagaaaggucuag

SEQ ID NO: 3507 - RNA, 4140 nt, Artificial Sequence
  Synthetic
auggacaagaaguacagcaucggacuggcaaucggaacaaacagcgucggaugggcagucaucacagacgaauacaaggucccgagcaagaaguucaagguccugggaaacacagacagacacagcaucaagaagaaccugaucggagcacugcuguucgacagcggagaaacagcagaagcaacaagacugaagagaacagcaagaagaagauacacaagaagaaagaacagaaucugcuaccugcaggaaaucuucagcaacgaaauggcaaaggucgacgacagcuucuuccacagacuggaagaaagcuuccuggucgaagaagacaagaagcacgaaagacacccgaucuucggaaacaucgucgacgaagucgcauaccacgaaaaguacccgacaaucuaccaccugagaaagaagcuggucgacagcacagacaaggcagaccugagacugaucuaccuggcacuggcacacaugaucaaguucagaggacacuuccugaucgaaggagaccugaacccggacaacagcgacgucgacaagcuguucauccagcugguccagacauacaaccagcuguucgaagaaaacccgaucaacgcaagcggagucgacgcaaaggcaauccugagcgcaagacugagcaagagcagaagacuggaaaaccugaucgcacagcugccgggagaaaagaagaacggacuguucggaaaccugaucgcacugagccugggacugacaccgaacuucaagagcaacuucgaccuggcagaagacgcaaagcugcagcugagcaaggacacauacgacgacgaccuggacaaccugcuggcacagaucggagaccaguacgcagaccuguuccuggcagcaaagaaccugagcgacgcaauccugcugagcgacauccugagagucaacacagaaaucacaaaggcaccgcugagcgcaagcaugaucaagagauacgacgaacaccaccaggaccugacacugcugaaggcacuggucagacagcagcugccggaaaaguacaaggaaaucuucuucgaccagagcaagaacggauacgcaggauacaucgacggaggagcaagccaggaagaauucuacaaguucaucaagccgauccuggaaaagauggacggaacagaagaacugcuggucaagcugaacagagaagaccugcugagaaagcagagaacauucgacaacggaagcaucccgcaccagauccaccugggagaacugcacgcaauccugagaagacaggaagacuucuacccguuccugaaggacaacagagaaaagaucgaaaagauccugacauucagaaucccguacuacgucggaccgcuggcaagaggaaacagcagauucgcauggaugacaagaaagagcgaagaaacaaucacaccguggaacuucgaagaagucgucgacaagggagcaagcgcacagagcuucaucgaaagaaugacaaacuucgacaagaaccugccgaacgaaaagguccugccgaagcacagccugcuguacgaauacuucacagucuacaacgaacugacaaaggucaaguacgucacagaaggaaugagaaagccggcauuccugagcggagaacagaagaaggcaaucgucgaccugcuguucaagacaaacagaaaggucacagucaagcagcugaaggaagacuacuucaagaagaucgaaugcuucgacagcgucgaaaucagcggagucgaagacagauucaacgcaagccugggaacauaccacgaccugcugaagaucaucaaggacaaggacuuccuggacaacgaagaaaacgaagacauccuggaagacaucguccugacacugacacuguucgaagacagagaaaugaucgaagaaagacugaagacauacgcacaccuguucgacgacaaggucaugaagcagcugaagagaagaagauacacaggauggggaagacugagcagaaagcugaucaacggaaucagagacaagcagagcggaaagacaauccuggacuuccugaagagcgacggauucgcaaacagaaacuucaugcagcugauccacgacgacagccugacauucaaggaagacauccagaaggcacaggucagcggacagggagacagccugcacgaacacaucgcaaaccuggcaggaagcccggcaaucaagaagggaauccugcagacagucaaggucgucgacgaacuggucaaggucaugggaagacacaagccggaaaacaucgucaucgaaauggcaagagaaaaccagacaacacagaagggacagaagaacagcagagaaagaaugaagagaaucgaagaaggaaucaaggaacugggaagccagauccugaaggaacacccggucgaaaacacacagcugcagaacgaaaagcuguaccuguacuaccugcagaacggaagagacauguacgucgaccaggaacuggacaucaacagacugagcgacuacgacgucgacgcaaucgucccgcagagcuuccugaaggacgacagcaucgacaacaagguccugacaagaagcgacaagaacagaggaaagagcgacaacgucccgagcgaagaagucgucaagaagaugaagaacuacuggagacagcugcugaacgcaaagcugaucacacagagaaaguucgacaaccugacaaaggcagagagaggaggacugagcgaacuggacaaggcaggauucaucaagagacagcuggucgaaacaagacagaucacaaagcacgucgcacagauccuggacagcagaaugaacacaaaguacgacgaaaacgacaagcugaucagagaagucaaggucaucacacugaagagcaagcuggucagcgacuucagaaaggacuuccaguucuacaaggucagagaaaucaacaacuaccaccacgcacacgacgcauaccugaacgcagucgucggaacagcacugaucaagaaguacccgaagcuggaaagcgaauucgucuacggagacuacaaggucuacgacgucagaaagaugaucgcaaagagcgaacaggaaaucggaaaggcaacagcaaaguacuucuucuacagcaacaucaugaacuucuucaagacagaaaucacacuggcaaacggagaaaucagaaagagaccgcugaucgaaacaaacggagaaacaggagaaaucgucugggacaagggaagagacuucgcaacagucagaaagguccugagcaugccgcaggucaacaucgucaagaagacagaaguccagacaggaggauucagcaaggaaagcauccugccgaagagaaacagcgacaagcugaucgcaagaaagaaggacugggacccgaagaaguacggaggauucgacagcccgacagucgcauacagcguccuggucgucgcaaaggucgaaaagggaaagagcaagaagcugaagagcgucaaggaacugcugggaaucacaaucauggaaagaagcagcuucgaaaagaacccgaucgacuuccuggaagcaaagggauacaaggaagucaagaaggaccugaucaucaagcugccgaaguacagccuguucgaacuggaaaacggaagaaagagaaugcuggcaagcgcaggagaacugcagaagggaaacgaacuggcacugccgagcaaguacgucaacuuccuguaccuggcaagccacuacgaaaagcugaagggaagcccggaagacaacgaacagaagcagcuguucgucgaacagcacaagcacuaccuggacgaaaucaucgaacagaucagcgaauucagcaagagagucauccuggcagacgcaaaccuggacaagguccugagcgcauacaacaagcacagagacaagccgaucagagaacaggcagaaaacaucauccaccuguucacacugacaaaccugggagcaccggcagcauucaaguacuucgacacaacaaucgacagaaagagauacacaagcacaaaggaaguccuggacgcaacacugauccaccagagcaucacaggacuguacgaaacaagaaucgaccugagccagcugggaggagacggaggaggaagcccgaagaagaagagaaaggucuag

SEQ ID NO: 3508 - RNA, 4134 nt, Artificial Sequence
  Synthetic
gacaagaaguacagcaucggacuggacaucggaacaaacagcgucggaugggcagucaucacagacgaauacaaggucccgagcaagaaguucaagguccugggaaacacagacagacacagcaucaagaagaaccugaucggagcacugcuguucgacagcggagaaacagcagaagcaacaagacugaagagaacagcaagaagaagauacacaagaagaaagaacagaaucugcuaccugcaggaaaucuucagcaacgaaauggcaaaggucgacgacagcuucuuccacagacuggaagaaagcuuccuggucgaagaagacaagaagcacgaaagacacccgaucuucggaaacaucgucgacgaagucgcauaccacgaaaaguacccgacaaucuaccaccugagaaagaagcuggucgacagcacagacaaggcagaccugagacugaucuaccuggcacuggcacacaugaucaaguucagaggacacuuccugaucgaaggagaccugaacccggacaacagcgacgucgacaagcuguucauccagcugguccagacauacaaccagcuguucgaagaaaacccgaucaacgcaagcggagucgacgcaaaggcaauccugagcgcaagacugagcaagagcagaagacuggaaaaccugaucgcacagcugccgggagaaaagaagaacggacuguucggaaaccugaucgcacugagccugggacugacaccgaacuucaagagcaacuucgaccuggcagaagacgcaaagcugcagcugagcaaggacacauacgacgacgaccuggacaaccugcuggcacagaucggagaccaguacgcagaccuguuccuggcagcaaagaaccugagcgacgcaauccugcugagcgacauccugagagucaacacagaaaucacaaaggcaccgcugagcgcaagcaugaucaagagauacgacgaacaccaccaggaccugacacugcugaaggcacuggucagacagcagcugccggaaaaguacaaggaaaucuucuucgaccagagcaagaacggauacgcaggauacaucgacggaggagcaagccaggaagaauucuacaaguucaucaagccgauccuggaaaagauggacggaacagaagaacugcuggucaagcugaacagagaagaccugcugagaaagcagagaacauucgacaacggaagcaucccgcaccagauccaccugggagaacugcacgcaauccugagaagacaggaagacuucuacccguuccugaaggacaacagagaaaagaucgaaaagauccugacauucagaaucccguacuacgucggaccgcuggcaagaggaaacagcagauucgcauggaugacaagaaagagcgaagaaacaaucacaccguggaacuucgaagaagucgucgacaagggagcaagcgcacagagcuucaucgaaagaaugacaaacuucgacaagaaccugccgaacgaaaagguccugccgaagcacagccugcuguacgaauacuucacagucuacaacgaacugacaaaggucaaguacgucacagaaggaaugagaaagccggcauuccugagcggagaacagaagaaggcaaucgucgaccugcuguucaagacaaacagaaaggucacagucaagcagcugaaggaagacuacuucaagaagaucgaaugcuucgacagcgucgaaaucagcggagucgaagacagauucaacgcaagccugggaacauaccacgaccugcugaagaucaucaaggacaaggacuuccuggacaacgaagaaaacgaagacauccuggaagacaucguccugacacugacacuguucgaagacagagaaaugaucgaagaaagacugaagacauacgcacaccuguucgacgacaaggucaugaagcagcugaagagaagaagauacacaggauggggaagacugagcagaaagcugaucaacggaaucagagacaagcagagcggaaagacaauccuggacuuccugaagagcgacggauucgcaaacagaaacuucaugcagcugauccacgacgacagccugacauucaaggaagacauccagaaggcacaggucagcggacagggagacagccugcacgaacacaucgcaaaccuggcaggaagcccggcaaucaagaagggaauccugcagacagucaaggucgucgacgaacuggucaaggucaugggaagacacaagccggaaaacaucgucaucgaaauggcaagagaaaaccagacaacacagaagggacagaagaacagcagagaaagaaugaagagaaucgaagaaggaaucaaggaacugggaagccagauccugaaggaacacccggucgaaaacacacagcugcagaacgaaaagcuguaccuguacuaccugcagaacggaagagacauguacgucgaccaggaacuggacaucaacagacugagcgacuacgacgucgaccacaucgucccgcagagcuuccugaaggacgacagcaucgacaacaagguccugacaagaagcgacaagaacagaggaaagagcgacaacgucccgagcgaagaagucgucaagaagaugaagaacuacuggagacagcugcugaacgcaaagcugaucacacagagaaaguucgacaaccugacaaaggcagagagaggaggacugagcgaacuggacaaggcaggauucaucaagagacagcuggucgaaacaagacagaucacaaagcacgucgcacagauccuggacagcagaaugaacacaaaguacgacgaaaacgacaagcugaucagagaagucaaggucaucacacugaagagcaagcuggucagcgacuucagaaaggacuuccaguucuacaaggucagagaaaucaacaacuaccaccacgcacacgacgcauaccugaacgcagucgucggaacagcacugaucaagaaguacccgaagcuggaaagcgaauucgucuacggagacuacaaggucuacgacgucagaaagaugaucgcaaagagcgaacaggaaaucggaaaggcaacagcaaaguacuucuucuacagcaacaucaugaacuucuucaagacagaaaucacacuggcaaacggagaaaucagaaagagaccgcugaucgaaacaaacggagaaacaggagaaaucgucugggacaagggaagagacuucgcaacagucagaaagguccugagcaugccgcaggucaacaucgucaagaagacagaaguccagacaggaggauucagcaaggaaagcauccugccgaagagaaacagcgacaagcugaucgcaagaaagaaggacugggacccgaagaaguacggaggauucgacagcccgacagucgcauacagcguccuggucgucgcaaaggucgaaaagggaaagagcaagaagcugaagagcgucaaggaacugcugggaaucacaaucauggaaagaagcagcuucgaaaagaacccgaucgacuuccuggaagcaaagggauacaaggaagucaagaaggaccugaucaucaagcugccgaaguacagccuguucgaacuggaaaacggaagaaagagaaugcuggcaagcgcaggagaacugcagaagggaaacgaacuggcacugccgagcaaguacgucaacuuccuguaccuggcaagccacuacgaaaagcugaagggaagcccggaagacaacgaacagaagcagcuguucgucgaacagcacaagcacuaccuggacgaaaucaucgaacagaucagcgaauucagcaagagagucauccuggcagacgcaaaccuggacaagguccugagcgcauacaacaagcacagagacaagccgaucagagaacaggcagaaaacaucauccaccuguucacacugacaaaccugggagcaccggcagcauucaaguacuucgacacaacaaucgacagaaagagauacacaagcacaaaggaaguccuggacgcaacacugauccaccagagcaucacaggacuguacgaaacaagaaucgaccugagccagcugggaggagacggaggaggaagcccgaagaagaagagaaagguc

SEQ ID NO: 3509 - RNA, 4134 nt, Artificial Sequence
  Synthetic
gacaagaaguacagcaucggacuggcaaucggaacaaacagcgucggaugggcagucaucacagacgaauacaaggucccgagcaagaaguucaagguccugggaaacacagacagacacagcaucaagaagaaccugaucggagcacugcuguucgacagcggagaaacagcagaagcaacaagacugaagagaacagcaagaagaagauacacaagaagaaagaacagaaucugcuaccugcaggaaaucuucagcaacgaaauggcaaaggucgacgacagcuucuuccacagacuggaagaaagcuuccuggucgaagaagacaagaagcacgaaagacacccgaucuucggaaacaucgucgacgaagucgcauaccacgaaaaguacccgacaaucuaccaccugagaaagaagcuggucgacagcacagacaaggcagaccugagacugaucuaccuggcacuggcacacaugaucaaguucagaggacacuuccugaucgaaggagaccugaacccggacaacagcgacgucgacaagcuguucauccagcugguccagacauacaaccagcuguucgaagaaaacccgaucaacgcaagcggagucgacgcaaaggcaauccugagcgcaagacugagcaagagcagaagacuggaaaaccugaucgcacagcugccgggagaaaagaagaacggacuguucggaaaccugaucgcacugagccugggacugacaccgaacuucaagagcaacuucgaccuggcagaagacgcaaagcugcagcugagcaaggacacauacgacgacgaccuggacaaccugcuggcacagaucggagaccaguacgcagaccuguuccuggcagcaaagaaccugagcgacgcaauccugcugagcgacauccugagagucaacacagaaaucacaaaggcaccgcugagcgcaagcaugaucaagagauacgacgaacaccaccaggaccugacacugcugaaggcacuggucagacagcagcugccggaaaaguacaaggaaaucuucuucgaccagagcaagaacggauacgcaggauacaucgacggaggagcaagccaggaagaauucuacaaguucaucaagccgauccuggaaaagauggacggaacagaagaacugcuggucaagcugaacagagaagaccugcugagaaagcagagaacauucgacaacggaagcaucccgcaccagauccaccugggagaacugcacgcaauccugagaagacaggaagacuucuacccguuccugaaggacaacagagaaaagaucgaaaagauccugacauucagaaucccguacuacgucggaccgcuggcaagaggaaacagcagauucgcauggaugacaagaaagagcgaagaaacaaucacaccguggaacuucgaagaagucgucgacaagggagcaagcgcacagagcuucaucgaaagaaugacaaacuucgacaagaaccugccgaacgaaaagguccugccgaagcacagccugcuguacgaauacuucacagucuacaacgaacugacaaaggucaaguacgucacagaaggaaugagaaagccggcauuccugagcggagaacagaagaaggcaaucgucgaccugcuguucaagacaaacagaaaggucacagucaagcagcugaaggaagacuacuucaagaagaucgaaugcuucgacagcgucgaaaucagcggagucgaagacagauucaacgcaagccugggaacauaccacgaccugcugaagaucaucaaggacaaggacuuccuggacaacgaagaaaacgaagacauccuggaagacaucguccugacacugacacuguucgaagacagagaaaugaucgaagaaagacugaagacauacgcacaccuguucgacgacaaggucaugaagcagcugaagagaagaagauacacaggauggggaagacugagcagaaagcugaucaacggaaucagagacaagcagagcggaaagacaauccuggacuuccugaagagcgacggauucgcaaacagaaacuucaugcagcugauccacgacgacagccugacauucaaggaagacauccagaaggcacaggucagcggacagggagacagccugcacgaacacaucgcaaaccuggcaggaagcccggcaaucaagaagggaauccugcagacagucaaggucgucgacgaacuggucaaggucaugggaagacacaagccggaaaacaucgucaucgaaauggcaagagaaaaccagacaacacagaagggacagaagaacagcagagaaagaaugaagagaaucgaagaaggaaucaaggaacugggaagccagauccugaaggaacacccggucgaaaacacacagcugcagaacgaaaagcuguaccuguacuaccugcagaacggaagagacauguacgucgaccaggaacuggacaucaacagacugagcgacuacgacgucgaccacaucgucccgcagagcuuccugaaggacgacagcaucgacaacaagguccugacaagaagcgacaagaacagaggaaagagcgacaacgucccgagcgaagaagucgucaagaagaugaagaacuacuggagacagcugcugaacgcaaagcugaucacacagagaaaguucgacaaccugacaaaggcagagagaggaggacugagcgaacuggacaaggcaggauucaucaagagacagcuggucgaaacaagacagaucacaaagcacgucgcacagauccuggacagcagaaugaacacaaaguacgacgaaaacgacaagcugaucagagaagucaaggucaucacacugaagagcaagcuggucagcgacuucagaaaggacuuccaguucuacaaggucagagaaaucaacaacuaccaccacgcacacgacgcauaccugaacgcagucgucggaacagcacugaucaagaaguacccgaagcuggaaagcgaauucgucuacggagacuacaaggucuacgacgucagaaagaugaucgcaaagagcgaacaggaaaucggaaaggcaacagcaaaguacuucuucuacagcaacaucaugaacuucuucaagacagaaaucacacuggcaaacggagaaaucagaaagagaccgcugaucgaaacaaacggagaaacaggagaaaucgucugggacaagggaagagacuucgcaacagucagaaagguccugagcaugccgcaggucaacaucgucaagaagacagaaguccagacaggaggauucagcaaggaaagcauccugccgaagagaaacagcgacaagcugaucgcaagaaagaaggacugggacccgaagaaguacggaggauucgacagcccgacagucgcauacagcguccuggucgucgcaaaggucgaaaagggaaagagcaagaagcugaagagcgucaaggaacugcugggaaucacaaucauggaaagaagcagcuucgaaaagaacccgaucgacuuccuggaagcaaagggauacaaggaagucaagaaggaccugaucaucaagcugccgaaguacagccuguucgaacuggaaaacggaagaaagagaaugcuggcaagcgcaggagaacugcagaagggaaacgaacuggcacugccgagcaaguacgucaacuuccuguaccuggcaagccacuacgaaaagcugaagggaagcccggaagacaacgaacagaagcagcuguucgucgaacagcacaagcacuaccuggacgaaaucaucgaacagaucagcgaauucagcaagagagucauccuggcagacgcaaaccuggacaagguccugagcgcauacaacaagcacagagacaagccgaucagagaacaggcagaaaacaucauccaccuguucacacugacaaaccugggagcaccggcagcauucaaguacuucgacacaacaaucgacagaaagagauacacaagcacaaaggaaguccuggacgcaacacugauccaccagagcaucacaggacuguacgaaacaagaaucgaccugagccagcugggaggagacggaggaggaagcccgaagaagaagagaaagguc

SEQ ID NO: 3510 - RNA, 4134 nt, Artificial Sequence
  Synthetic
gacaagaaguacagcaucggacuggcaaucggaacaaacagcgucggaugggcagucaucacagacgaauacaaggucccgagcaagaaguucaagguccugggaaacacagacagacacagcaucaagaagaaccugaucggagcacugcuguucgacagcggagaaacagcagaagcaacaagacugaagagaacagcaagaagaagauacacaagaagaaagaacagaaucugcuaccugcaggaaaucuucagcaacgaaauggcaaaggucgacgacagcuucuuccacagacuggaagaaagcuuccuggucgaagaagacaagaagcacgaaagacacccgaucuucggaaacaucgucgacgaagucgcauaccacgaaaaguacccgacaaucuaccaccugagaaagaagcuggucgacagcacagacaaggcagaccugagacugaucuaccuggcacuggcacacaugaucaaguucagaggacacuuccugaucgaaggagaccugaacccggacaacagcgacgucgacaagcuguucauccagcugguccagacauacaaccagcuguucgaagaaaacccgaucaacgcaagcggagucgacgcaaaggcaauccugagcgcaagacugagcaagagcagaagacuggaaaaccugaucgcacagcugccgggagaaaagaagaacggacuguucggaaaccugaucgcacugagccugggacugacaccgaacuucaagagcaacuucgaccuggcagaagacgcaaagcugcagcugagcaaggacacauacgacgacgaccuggacaaccugcuggcacagaucggagaccaguacgcagaccuguuccuggcagcaaagaaccugagcgacgcaauccugcugagcgacauccugagagucaacacagaaaucacaaaggcaccgcugagcgcaagcaugaucaagagauacgacgaacaccaccaggaccugacacugcugaaggcacuggucagacagcagcugccggaaaaguacaaggaaaucuucuucgaccagagcaagaacggauacgcaggauacaucgacggaggagcaagccaggaagaauucuacaaguucaucaagccgauccuggaaaagauggacggaacagaagaacugcuggucaagcugaacagagaagaccugcugagaaagcagagaacauucgacaacggaagcaucccgcaccagauccaccugggagaacugcacgcaauccugagaagacaggaagacuucuacccguuccugaaggacaacagagaaaagaucgaaaagauccugacauucagaaucccguacuacgucggaccgcuggcaagaggaaacagcagauucgcauggaugacaagaaagagcgaagaaacaaucacaccguggaacuucgaagaagucgucgacaagggagcaagcgcacagagcuucaucgaaagaaugacaaacuucgacaagaaccugccgaacgaaaagguccugccgaagcacagccugcuguacgaauacuucacagucuacaacgaacugacaaaggucaaguacgucacagaaggaaugagaaagccggcauuccugagcggagaacagaagaaggcaaucgucgaccugcuguucaagacaaacagaaaggucacagucaagcagcugaaggaagacuacuucaagaagaucgaaugcuucgacagcgucgaaaucagcggagucgaagacagauucaacgcaagccugggaacauaccacgaccugcugaagaucaucaaggacaaggacuuccuggacaacgaagaaaacgaagacauccuggaagacaucguccugacacugacacuguucgaagacagagaaaugaucgaagaaagacugaagacauacgcacaccuguucgacgacaaggucaugaagcagcugaagagaagaagauacacaggauggggaagacugagcagaaagcugaucaacggaaucagagacaagcagagcggaaagacaauccuggacuuccugaagagcgacggauucgcaaacagaaacuucaugcagcugauccacgacgacagccugacauucaaggaagacauccagaaggcacaggucagcggacagggagacagccugcacgaacacaucgcaaaccuggcaggaagcccggcaaucaagaagggaauccugcagacagucaaggucgucgacgaacuggucaaggucaugggaagacacaagccggaaaacaucgucaucgaaauggcaagagaaaaccagacaacacagaagggacagaagaacagcagagaaagaaugaagagaaucgaagaaggaaucaaggaacugggaagccagauccugaaggaacacccggucgaaaacacacagcugcagaacgaaaagcuguaccuguacuaccugcagaacggaagagacauguacgucgaccaggaacuggacaucaacagacugagcgacuacgacgucgacgcaaucgucccgcagagcuuccugaaggacgacagcaucgacaacaagguccugacaagaagcgacaagaacagaggaaagagcgacaacgucccgagcgaagaagucgucaagaagaugaagaacuacuggagacagcugcugaacgcaaagcugaucacacagagaaaguucgacaaccugacaaaggcagagagaggaggacugagcgaacuggacaaggcaggauucaucaagagacagcuggucgaaacaagacagaucacaaagcacgucgcacagauccuggacagcagaaugaacacaaaguacgacgaaaacgacaagcugaucagagaagucaaggucaucacacugaagagcaagcuggucagcgacuucagaaaggacuuccaguucuacaaggucagagaaaucaacaacuaccaccacgcacacgacgcauaccugaacgcagucgucggaacagcacugaucaagaaguacccgaagcuggaaagcgaauucgucuacggagacuacaaggucuacgacgucagaaagaugaucgcaaagagcgaacaggaaaucggaaaggcaacagcaaaguacuucuucuacagcaacaucaugaacuucuucaagacagaaaucacacuggcaaacggagaaaucagaaagagaccgcugaucgaaacaaacggagaaacaggagaaaucgucugggacaagggaagagacuucgcaacagucagaaagguccugagcaugccgcaggucaacaucgucaagaagacagaaguccagacaggaggauucagcaaggaaagcauccugccgaagagaaacagcgacaagcugaucgcaagaaagaaggacugggacccgaagaaguacggaggauucgacagcccgacagucgcauacagcguccuggucgucgcaaaggucgaaaagggaaagagcaagaagcugaagagcgucaaggaacugcugggaaucacaaucauggaaagaagcagcuucgaaaagaacccgaucgacuuccuggaagcaaagggauacaaggaagucaagaaggaccugaucaucaagcugccgaaguacagccuguucgaacuggaaaacggaagaaagagaaugcuggcaagcgcaggagaacugcagaagggaaacgaacuggcacugccgagcaaguacgucaacuuccuguaccuggcaagccacuacgaaaagcugaagggaagcccggaagacaacgaacagaagcagcuguucgucgaacagcacaagcacuaccuggacgaaaucaucgaacagaucagcgaauucagcaagagagucauccuggcagacgcaaaccuggacaagguccugagcgcauacaacaagcacagagacaagccgaucagagaacaggcagaaaacaucauccaccuguucacacugacaaaccugggagcaccggcagcauucaaguacuucgacacaacaaucgacagaaagagauacacaagcacaaaggaaguccuggacgcaacacugauccaccagagcaucacaggacuguacgaaacaagaaucgaccugagccagcugggaggagacggaggaggaagcccgaagaagaagagaaagguc

SEQ ID NO: 3511 - RNA, 4107 nt, Artificial Sequence
  Synthetic
auggacaagaaguacagcaucggacuggacaucggaacaaacagcgucggaugggcagucaucacagacgaauacaaggucccgagcaagaaguucaagguccugggaaacacagacagacacagcaucaagaagaaccugaucggagcacugcuguucgacagcggagaaacagcagaagcaacaagacugaagagaacagcaagaagaagauacacaagaagaaagaacagaaucugcuaccugcaggaaaucuucagcaacgaaauggcaaaggucgacgacagcuucuuccacagacuggaagaaagcuuccuggucgaagaagacaagaagcacgaaagacacccgaucuucggaaacaucgucgacgaagucgcauaccacgaaaaguacccgacaaucuaccaccugagaaagaagcuggucgacagcacagacaaggcagaccugagacugaucuaccuggcacuggcacacaugaucaaguucagaggacacuuccugaucgaaggagaccugaacccggacaacagcgacgucgacaagcuguucauccagcugguccagacauacaaccagcuguucgaagaaaacccgaucaacgcaagcggagucgacgcaaaggcaauccugagcgcaagacugagcaagagcagaagacuggaaaaccugaucgcacagcugccgggagaaaagaagaacggacuguucggaaaccugaucgcacugagccugggacugacaccgaacuucaagagcaacuucgaccuggcagaagacgcaaagcugcagcugagcaaggacacauacgacgacgaccuggacaaccugcuggcacagaucggagaccaguacgcagaccuguuccuggcagcaaagaaccugagcgacgcaauccugcugagcgacauccugagagucaacacagaaaucacaaaggcaccgcugagcgcaagcaugaucaagagauacgacgaacaccaccaggaccugacacugcugaaggcacuggucagacagcagcugccggaaaaguacaaggaaaucuucuucgaccagagcaagaacggauacgcaggauacaucgacggaggagcaagccaggaagaauucuacaaguucaucaagccgauccuggaaaagauggacggaacagaagaacugcuggucaagcugaacagagaagaccugcugagaaagcagagaacauucgacaacggaagcaucccgcaccagauccaccugggagaacugcacgcaauccugagaagacaggaagacuucuacccguuccugaaggacaacagagaaaagaucgaaaagauccugacauucagaaucccguacuacgucggaccgcuggcaagaggaaacagcagauucgcauggaugacaagaaagagcgaagaaacaaucacaccguggaacuucgaagaagucgucgacaagggagcaagcgcacagagcuucaucgaaagaaugacaaacuucgacaagaaccugccgaacgaaaagguccugccgaagcacagccugcuguacgaauacuucacagucuacaacgaacugacaaaggucaaguacgucacagaaggaaugagaaagccggcauuccugagcggagaacagaagaaggcaaucgucgaccugcuguucaagacaaacagaaaggucacagucaagcagcugaaggaagacuacuucaagaagaucgaaugcuucgacagcgucgaaaucagcggagucgaagacagauucaacgcaagccugggaacauaccacgaccugcugaagaucaucaaggacaaggacuuccuggacaacgaagaaaacgaagacauccuggaagacaucguccugacacugacacuguucgaagacagagaaaugaucgaagaaagacugaagacauacgcacaccuguucgacgacaaggucaugaagcagcugaagagaagaagauacacaggauggggaagacugagcagaaagcugaucaacggaaucagagacaagcagagcggaaagacaauccuggacuuccugaagagcgacggauucgcaaacagaaacuucaugcagcugauccacgacgacagccugacauucaaggaagacauccagaaggcacaggucagcggacagggagacagccugcacgaacacaucgcaaaccuggcaggaagcccggcaaucaagaagggaauccugcagacagucaaggucgucgacgaacuggucaaggucaugggaagacacaagccggaaaacaucgucaucgaaauggcaagagaaaaccagacaacacagaagggacagaagaacagcagagaaagaaugaagagaaucgaagaaggaaucaaggaacugggaagccagauccugaaggaacacccggucgaaaacacacagcugcagaacgaaaagcuguaccuguacuaccugcagaacggaagagacauguacgucgaccaggaacuggacaucaacagacugagcgacuacgacgucgaccacaucgucccgcagagcuuccugaaggacgacagcaucgacaacaagguccugacaagaagcgacaagaacagaggaaagagcgacaacgucccgagcgaagaagucgucaagaagaugaagaacuacuggagacagcugcugaacgcaaagcugaucacacagagaaaguucgacaaccugacaaaggcagagagaggaggacugagcgaacuggacaaggcaggauucaucaagagacagcuggucgaaacaagacagaucacaaagcacgucgcacagauccuggacagcagaaugaacacaaaguacgacgaaaacgacaagcugaucagagaagucaaggucaucacacugaagagcaagcuggucagcgacuucagaaaggacuuccaguucuacaaggucagagaaaucaacaacuaccaccacgcacacgacgcauaccugaacgcagucgucggaacagcacugaucaagaaguacccgaagcuggaaagcgaauucgucuacggagacuacaaggucuacgacgucagaaagaugaucgcaaagagcgaacaggaaaucggaaaggcaacagcaaaguacuucuucuacagcaacaucaugaacuucuucaagacagaaaucacacuggcaaacggagaaaucagaaagagaccgcugaucgaaacaaacggagaaacaggagaaaucgucugggacaagggaagagacuucgcaacagucagaaagguccugagcaugccgcaggucaacaucgucaagaagacagaaguccagacaggaggauucagcaaggaaagcauccugccgaagagaaacagcgacaagcugaucgcaagaaagaaggacugggacccgaagaaguacggaggauucgacagcccgacagucgcauacagcguccuggucgucgcaaaggucgaaaagggaaagagcaagaagcugaagagcgucaaggaacugcugggaaucacaaucauggaaagaagcagcuucgaaaagaacccgaucgacuuccuggaagcaaagggauacaaggaagucaagaaggaccugaucaucaagcugccgaaguacagccuguucgaacuggaaaacggaagaaagagaaugcuggcaagcgcaggagaacugcagaagggaaacgaacuggcacugccgagcaaguacgucaacuuccuguaccuggcaagccacuacgaaaagcugaagggaagcccggaagacaacgaacagaagcagcuguucgucgaacagcacaagcacuaccuggacgaaaucaucgaacagaucagcgaauucagcaagagagucauccuggcagacgcaaaccuggacaagguccugagcgcauacaacaagcacagagacaagccgaucagagaacaggcagaaaacaucauccaccuguucacacugacaaaccugggagcaccggcagcauucaaguacuucgacacaacaaucgacagaaagagauacacaagcacaaaggaaguccuggacgcaacacugauccaccagagcaucacaggacuguacgaaacaagaaucgaccugagccagcugggaggagacuag

SEQ ID NO: 3512 - RNA, 4101 nt, Artificial Sequence
  Synthetic
gacaagaaguacagcaucggacuggacaucggaacaaacagcgucggaugggcagucaucacagacgaauacaaggucccgagcaagaaguucaagguccugggaaacacagacagacacagcaucaagaagaaccugaucggagcacugcuguucgacagcggagaaacagcagaagcaacaagacugaagagaacagcaagaagaagauacacaagaagaaagaacagaaucugcuaccugcaggaaaucuucagcaacgaaauggcaaaggucgacgacagcuucuuccacagacuggaagaaagcuuccuggucgaagaagacaagaagcacgaaagacacccgaucuucggaaacaucgucgacgaagucgcauaccacgaaaaguacccgacaaucuaccaccugagaaagaagcuggucgacagcacagacaaggcagaccugagacugaucuaccuggcacuggcacacaugaucaaguucagaggacacuuccugaucgaaggagaccugaacccggacaacagcgacgucgacaagcuguucauccagcugguccagacauacaaccagcuguucgaagaaaacccgaucaacgcaagcggagucgacgcaaaggcaauccugagcgcaagacugagcaagagcagaagacuggaaaaccugaucgcacagcugccgggagaaaagaagaacggacuguucggaaaccugaucgcacugagccugggacugacaccgaacuucaagagcaacuucgaccuggcagaagacgcaaagcugcagcugagcaaggacacauacgacgacgaccuggacaaccugcuggcacagaucggagaccaguacgcagaccuguuccuggcagcaaagaaccugagcgacgcaauccugcugagcgacauccugagagucaacacagaaaucacaaaggcaccgcugagcgcaagcaugaucaagagauacgacgaacaccaccaggaccugacacugcugaaggcacuggucagacagcagcugccggaaaaguacaaggaaaucuucuucgaccagagcaagaacggauacgcaggauacaucgacggaggagcaagccaggaagaauucuacaaguucaucaagccgauccuggaaaagauggacggaacagaagaacugcuggucaagcugaacagagaagaccugcugagaaagcagagaacauucgacaacggaagcaucccgcaccagauccaccugggagaacugcacgcaauccugagaagacaggaagacuucuacccguuccugaaggacaacagagaaaagaucgaaaagauccugacauucagaaucccguacuacgucggaccgcuggcaagaggaaacagcagauucgcauggaugacaagaaagagcgaagaaacaaucacaccguggaacuucgaagaagucgucgacaagggagcaagcgcacagagcuucaucgaaagaaugacaaacuucgacaagaaccugccgaacgaaaagguccugccgaagcacagccugcuguacgaauacuucacagucuacaacgaacugacaaaggucaaguacgucacagaaggaaugagaaagccggcauuccugagcggagaacagaagaaggcaaucgucgaccugcuguucaagacaaacagaaaggucacagucaagcagcugaaggaagacuacuucaagaagaucgaaugcuucgacagcgucgaaaucagcggagucgaagacagauucaacgcaagccugggaacauaccacgaccugcugaagaucaucaaggacaaggacuuccuggacaacgaagaaaacgaagacauccuggaagacaucguccugacacugacacuguucgaagacagagaaaugaucgaagaaagacugaagacauacgcacaccuguucgacgacaaggucaugaagcagcugaagagaagaagauacacaggauggggaagacugagcagaaagcugaucaacggaaucagagacaagcagagcggaaagacaauccuggacuuccugaagagcgacggauucgcaaacagaaacuucaugcagcugauccacgacgacagccugacauucaaggaagacauccagaaggcacaggucagcggacagggagacagccugcacgaacacaucgcaaaccuggcaggaagcccggcaaucaagaagggaauccugcagacagucaaggucgucgacgaacuggucaaggucaugggaagacacaagccggaaaacaucgucaucgaaauggcaagagaaaaccagacaacacagaagggacagaagaacagcagagaaagaaugaagagaaucgaagaaggaaucaaggaacugggaagccagauccugaaggaacacccggucgaaaacacacagcugcagaacgaaaagcuguaccuguacuaccugcagaacggaagagacauguacgucgaccaggaacuggacaucaacagacugagcgacuacgacgucgaccacaucgucccgcagagcuuccugaaggacgacagcaucgacaacaagguccugacaagaagcgacaagaacagaggaaagagcgacaacgucccgagcgaagaagucgucaagaagaugaagaacuacuggagacagcugcugaacgcaaagcugaucacacagagaaaguucgacaaccugacaaaggcagagagaggaggacugagcgaacuggacaaggcaggauucaucaagagacagcuggucgaaacaagacagaucacaaagcacgucgcacagauccuggacagcagaaugaacacaaaguacgacgaaaacgacaagcugaucagagaagucaaggucaucacacugaagagcaagcuggucagcgacuucagaaaggacuuccaguucuacaaggucagagaaaucaacaacuaccaccacgcacacgacgcauaccugaacgcagucgucggaacagcacugaucaagaaguacccgaagcuggaaagcgaauucgucuacggagacuacaaggucuacgacgucagaaagaugaucgcaaagagcgaacaggaaaucggaaaggcaacagcaaaguacuucuucuacagcaacaucaugaacuucuucaagacagaaaucacacuggcaaacggagaaaucagaaagagaccgcugaucgaaacaaacggagaaacaggagaaaucgucugggacaagggaagagacuucgcaacagucagaaagguccugagcaugccgcaggucaacaucgucaagaagacagaaguccagacaggaggauucagcaaggaaagcauccugccgaagagaaacagcgacaagcugaucgcaagaaagaaggacugggacccgaagaaguacggaggauucgacagcccgacagucgcauacagcguccuggucgucgcaaaggucgaaaagggaaagagcaagaagcugaagagcgucaaggaacugcugggaaucacaaucauggaaagaagcagcuucgaaaagaacccgaucgacuuccuggaagcaaagggauacaaggaagucaagaaggaccugaucaucaagcugccgaaguacagccuguucgaacuggaaaacggaagaaagagaaugcuggcaagcgcaggagaacugcagaagggaaacgaacuggcacugccgagcaaguacgucaacuuccuguaccuggcaagccacuacgaaaagcugaagggaagcccggaagacaacgaacagaagcagcuguucgucgaacagcacaagcacuaccuggacgaaaucaucgaacagaucagcgaauucagcaagagagucauccuggcagacgcaaaccuggacaagguccugagcgcauacaacaagcacagagacaagccgaucagagaacaggcagaaaacaucauccaccuguucacacugacaaaccugggagcaccggcagcauucaaguacuucgacacaacaaucgacagaaagagauacacaagcacaaaggaaguccuggacgcaacacugauccaccagagcaucacaggacuguacgaaacaagaaucgaccugagccagcugggaggagac

SEQ ID NO: 3513 - RNA, 4107 nt, Artificial Sequence
  Synthetic
auggacaagaaguacagcaucggacuggcaaucggaacaaacagcgucggaugggcagucaucacagacgaauacaaggucccgagcaagaaguucaagguccugggaaacacagacagacacagcaucaagaagaaccugaucggagcacugcuguucgacagcggagaaacagcagaagcaacaagacugaagagaacagcaagaagaagauacacaagaagaaagaacagaaucugcuaccugcaggaaaucuucagcaacgaaauggcaaaggucgacgacagcuucuuccacagacuggaagaaagcuuccuggucgaagaagacaagaagcacgaaagacacccgaucuucggaaacaucgucgacgaagucgcauaccacgaaaaguacccgacaaucuaccaccugagaaagaagcuggucgacagcacagacaaggcagaccugagacugaucuaccuggcacuggcacacaugaucaaguucagaggacacuuccugaucgaaggagaccugaacccggacaacagcgacgucgacaagcuguucauccagcugguccagacauacaaccagcuguucgaagaaaacccgaucaacgcaagcggagucgacgcaaaggcaauccugagcgcaagacugagcaagagcagaagacuggaaaaccugaucgcacagcugccgggagaaaagaagaacggacuguucggaaaccugaucgcacugagccugggacugacaccgaacuucaagagcaacuucgaccuggcagaagacgcaaagcugcagcugagcaaggacacauacgacgacgaccuggacaaccugcuggcacagaucggagaccaguacgcagaccuguuccuggcagcaaagaaccugagcgacgcaauccugcugagcgacauccugagagucaacacagaaaucacaaaggcaccgcugagcgcaagcaugaucaagagauacgacgaacaccaccaggaccugacacugcugaaggcacuggucagacagcagcugccggaaaaguacaaggaaaucuucuucgaccagagcaagaacggauacgcaggauacaucgacggaggagcaagccaggaagaauucuacaaguucaucaagccgauccuggaaaagauggacggaacagaagaacugcuggucaagcugaacagagaagaccugcugagaaagcagagaacauucgacaacggaagcaucccgcaccagauccaccugggagaacugcacgcaauccugagaagacaggaagacuucuacccguuccugaaggacaacagagaaaagaucgaaaagauccugacauucagaaucccguacuacgucggaccgcuggcaagaggaaacagcagauucgcauggaugacaagaaagagcgaagaaacaaucacaccguggaacuucgaagaagucgucgacaagggagcaagcgcacagagcuucaucgaaagaaugacaaacuucgacaagaaccugccgaacgaaaagguccugccgaagcacagccugcuguacgaauacuucacagucuacaacgaacugacaaaggucaaguacgucacagaaggaaugagaaagccggcauuccugagcggagaacagaagaaggcaaucgucgaccugcuguucaagacaaacagaaaggucacagucaagcagcugaaggaagacuacuucaagaagaucgaaugcuucgacagcgucgaaaucagcggagucgaagacagauucaacgcaagccugggaacauaccacgaccugcugaagaucaucaaggacaaggacuuccuggacaacgaagaaaacgaagacauccuggaagacaucguccugacacugacacuguucgaagacagagaaaugaucgaagaaagacugaagacauacgcacaccuguucgacgacaaggucaugaagcagcugaagagaagaagauacacaggauggggaagacugagcagaaagcugaucaacggaaucagagacaagcagagcggaaagacaauccuggacuuccugaagagcgacggauucgcaaacagaaacuucaugcagcugauccacgacgacagccugacauucaaggaagacauccagaaggcacaggucagcggacagggagacagccugcacgaacacaucgcaaaccuggcaggaagcccggcaaucaagaagggaauccugcagacagucaaggucgucgacgaacuggucaaggucaugggaagacacaagccggaaaacaucgucaucgaaauggcaagagaaaaccagacaacacagaagggacagaagaacagcagagaaagaaugaagagaaucgaagaaggaaucaaggaacugggaagccagauccugaaggaacacccggucgaaaacacacagcugcagaacgaaaagcuguaccuguacuaccugcagaacggaagagacauguacgucgaccaggaacuggacaucaacagacugagcgacuacgacgucgaccacaucgucccgcagagcuuccugaaggacgacagcaucgacaacaagguccugacaagaagcgacaagaacagaggaaagagcgacaacgucccgagcgaagaagucgucaagaagaugaagaacuacuggagacagcugcugaacgcaaagcugaucacacagagaaaguucgacaaccugacaaaggcagagagaggaggacugagcgaacuggacaaggcaggauucaucaagagacagcuggucgaaacaagacagaucacaaagcacgucgcacagauccuggacagcagaaugaacacaaaguacgacgaaaacgacaagcugaucagagaagucaaggucaucacacugaagagcaagcuggucagcgacuucagaaaggacuuccaguucuacaaggucagagaaaucaacaacuaccaccacgcacacgacgcauaccugaacgcagucgucggaacagcacugaucaagaaguacccgaagcuggaaagcgaauucgucuacggagacuacaaggucuacgacgucagaaagaugaucgcaaagagcgaacaggaaaucggaaaggcaacagcaaaguacuucuucuacagcaacaucaugaacuucuucaagacagaaaucacacuggcaaacggagaaaucagaaagagaccgcugaucgaaacaaacggagaaacaggagaaaucgucugggacaagggaagagacuucgcaacagucagaaagguccugagcaugccgcaggucaacaucgucaagaagacagaaguccagacaggaggauucagcaaggaaagcauccugccgaagagaaacagcgacaagcugaucgcaagaaagaaggacugggacccgaagaaguacggaggauucgacagcccgacagucgcauacagcguccuggucgucgcaaaggucgaaaagggaaagagcaagaagcugaagagcgucaaggaacugcugggaaucacaaucauggaaagaagcagcuucgaaaagaacccgaucgacuuccuggaagcaaagggauacaaggaagucaagaaggaccugaucaucaagcugccgaaguacagccuguucgaacuggaaaacggaagaaagagaaugcuggcaagcgcaggagaacugcagaagggaaacgaacuggcacugccgagcaaguacgucaacuuccuguaccuggcaagccacuacgaaaagcugaagggaagcccggaagacaacgaacagaagcagcuguucgucgaacagcacaagcacuaccuggacgaaaucaucgaacagaucagcgaauucagcaagagagucauccuggcagacgcaaaccuggacaagguccugagcgcauacaacaagcacagagacaagccgaucagagaacaggcagaaaacaucauccaccuguucacacugacaaaccugggagcaccggcagcauucaaguacuucgacacaacaaucgacagaaagagauacacaagcacaaaggaaguccuggacgcaacacugauccaccagagcaucacaggacuguacgaaacaagaaucgaccugagccagcugggaggagacuag

SEQ ID NO: 3514 - RNA, 4101 nt, Artificial Sequence
  Synthetic
gacaagaaguacagcaucggacuggcaaucggaacaaacagcgucggaugggcagucaucacagacgaauacaaggucccgagcaagaaguucaagguccugggaaacacagacagacacagcaucaagaagaaccugaucggagcacugcuguucgacagcggagaaacagcagaagcaacaagacugaagagaacagcaagaagaagauacacaagaagaaagaacagaaucugcuaccugcaggaaaucuucagcaacgaaauggcaaaggucgacgacagcuucuuccacagacuggaagaaagcuuccuggucgaagaagacaagaagcacgaaagacacccgaucuucggaaacaucgucgacgaagucgcauaccacgaaaaguacccgacaaucuaccaccugagaaagaagcuggucgacagcacagacaaggcagaccugagacugaucuaccuggcacuggcacacaugaucaaguucagaggacacuuccugaucgaaggagaccugaacccggacaacagcgacgucgacaagcuguucauccagcugguccagacauacaaccagcuguucgaagaaaacccgaucaacgcaagcggagucgacgcaaaggcaauccugagcgcaagacugagcaagagcagaagacuggaaaaccugaucgcacagcugccgggagaaaagaagaacggacuguucggaaaccugaucgcacugagccugggacugacaccgaacuucaagagcaacuucgaccuggcagaagacgcaaagcugcagcugagcaaggacacauacgacgacgaccuggacaaccugcuggcacagaucggagaccaguacgcagaccuguuccuggcagcaaagaaccugagcgacgcaauccugcugagcgacauccugagagucaacacagaaaucacaaaggcaccgcugagcgcaagcaugaucaagagauacgacgaacaccaccaggaccugacacugcugaaggcacuggucagacagcagcugccggaaaaguacaaggaaaucuucuucgaccagagcaagaacggauacgcaggauacaucgacggaggagcaagccaggaagaauucuacaaguucaucaagccgauccuggaaaagauggacggaacagaagaacugcuggucaagcugaacagagaagaccugcugagaaagcagagaacauucgacaacggaagcaucccgcaccagauccaccugggagaacugcacgcaauccugagaagacaggaagacuucuacccguuccugaaggacaacagagaaaagaucgaaaagauccugacauucagaaucccguacuacgucggaccgcuggcaagaggaaacagcagauucgcauggaugacaagaaagagcgaagaaacaaucacaccguggaacuucgaagaagucgucgacaagggagcaagcgcacagagcuucaucgaaagaaugacaaacuucgacaagaaccugccgaacgaaaagguccugccgaagcacagccugcuguacgaauacuucacagucuacaacgaacugacaaaggucaaguacgucacagaaggaaugagaaagccggcauuccugagcggagaacagaagaaggcaaucgucgaccugcuguucaagacaaacagaaaggucacagucaagcagcugaaggaagacuacuucaagaagaucgaaugcuucgacagcgucgaaaucagcggagucgaagacagauucaacgcaagccugggaacauaccacgaccugcugaagaucaucaaggacaaggacuuccuggacaacgaagaaaacgaagacauccuggaagacaucguccugacacugacacuguucgaagacagagaaaugaucgaagaaagacugaagacauacgcacaccuguucgacgacaaggucaugaagcagcugaagagaagaagauacacaggauggggaagacugagcagaaagcugaucaacggaaucagagacaagcagagcggaaagacaauccuggacuuccugaagagcgacggauucgcaaacagaaacuucaugcagcugauccacgacgacagccugacauucaaggaagacauccagaaggcacaggucagcggacagggagacagccugcacgaacacaucgcaaaccuggcaggaagcccggcaaucaagaagggaauccugcagacagucaaggucgucgacgaacuggucaaggucaugggaagacacaagccggaaaacaucgucaucgaaauggcaagagaaaaccagacaacacagaagggacagaagaacagcagagaaagaaugaagagaaucgaagaaggaaucaaggaacugggaagccagauccugaaggaacacccggucgaaaacacacagcugcagaacgaaaagcuguaccuguacuaccugcagaacggaagagacauguacgucgaccaggaacuggacaucaacagacugagcgacuacgacgucgaccacaucgucccgcagagcuuccugaaggacgacagcaucgacaacaagguccugacaagaagcgacaagaacagaggaaagagcgacaacgucccgagcgaagaagucgucaagaagaugaagaacuacuggagacagcugcugaacgcaaagcugaucacacagagaaaguucgacaaccugacaaaggcagagagaggaggacugagcgaacuggacaaggcaggauucaucaagagacagcuggucgaaacaagacagaucacaaagcacgucgcacagauccuggacagcagaaugaacacaaaguacgacgaaaacgacaagcugaucagagaagucaaggucaucacacugaagagcaagcuggucagcgacuucagaaaggacuuccaguucuacaaggucagagaaaucaacaacuaccaccacgcacacgacgcauaccugaacgcagucgucggaacagcacugaucaagaaguacccgaagcuggaaagcgaauucgucuacggagacuacaaggucuacgacgucagaaagaugaucgcaaagagcgaacaggaaaucggaaaggcaacagcaaaguacuucuucuacagcaacaucaugaacuucuucaagacagaaaucacacuggcaaacggagaaaucagaaagagaccgcugaucgaaacaaacggagaaacaggagaaaucgucugggacaagggaagagacuucgcaacagucagaaagguccugagcaugccgcaggucaacaucgucaagaagacagaaguccagacaggaggauucagcaaggaaagcauccugccgaagagaaacagcgacaagcugaucgcaagaaagaaggacugggacccgaagaaguacggaggauucgacagcccgacagucgcauacagcguccuggucgucgcaaaggucgaaaagggaaagagcaagaagcugaagagcgucaaggaacugcugggaaucacaaucauggaaagaagcagcuucgaaaagaacccgaucgacuuccuggaagcaaagggauacaaggaagucaagaaggaccugaucaucaagcugccgaaguacagccuguucgaacuggaaaacggaagaaagagaaugcuggcaagcgcaggagaacugcagaagggaaacgaacuggcacugccgagcaaguacgucaacuuccuguaccuggcaagccacuacgaaaagcugaagggaagcccggaagacaacgaacagaagcagcuguucgucgaacagcacaagcacuaccuggacgaaaucaucgaacagaucagcgaauucagcaagagagucauccuggcagacgcaaaccuggacaagguccugagcgcauacaacaagcacagagacaagccgaucagagaacaggcagaaaacaucauccaccuguucacacugacaaaccugggagcaccggcagcauucaaguacuucgacacaacaaucgacagaaagagauacacaagcacaaaggaaguccuggacgcaacacugauccaccagagcaucacaggacuguacgaaacaagaaucgaccugagccagcugggaggagac

SEQ ID NO: 3515 - RNA, 4107 nt, Artificial Sequence
  Synthetic
auggacaagaaguacagcaucggacuggcaaucggaacaaacagcgucggaugggcagucaucacagacgaauacaaggucccgagcaagaaguucaagguccugggaaacacagacagacacagcaucaagaagaaccugaucggagcacugcuguucgacagcggagaaacagcagaagcaacaagacugaagagaacagcaagaagaagauacacaagaagaaagaacagaaucugcuaccugcaggaaaucuucagcaacgaaauggcaaaggucgacgacagcuucuuccacagacuggaagaaagcuuccuggucgaagaagacaagaagcacgaaagacacccgaucuucggaaacaucgucgacgaagucgcauaccacgaaaaguacccgacaaucuaccaccugagaaagaagcuggucgacagcacagacaaggcagaccugagacugaucuaccuggcacuggcacacaugaucaaguucagaggacacuuccugaucgaaggagaccugaacccggacaacagcgacgucgacaagcuguucauccagcugguccagacauacaaccagcuguucgaagaaaacccgaucaacgcaagcggagucgacgcaaaggcaauccugagcgcaagacugagcaagagcagaagacuggaaaaccugaucgcacagcugccgggagaaaagaagaacggacuguucggaaaccugaucgcacugagccugggacugacaccgaacuucaagagcaacuucgaccuggcagaagacgcaaagcugcagcugagcaaggacacauacgacgacgaccuggacaaccugcuggcacagaucggagaccaguacgcagaccuguuccuggcagcaaagaaccugagcgacgcaauccugcugagcgacauccugagagucaacacagaaaucacaaaggcaccgcugagcgcaagcaugaucaagagauacgacgaacaccaccaggaccugacacugcugaaggcacuggucagacagcagcugccggaaaaguacaaggaaaucuucuucgaccagagcaagaacggauacgcaggauacaucgacggaggagcaagccaggaagaauucuacaaguucaucaagccgauccuggaaaagauggacggaacagaagaacugcuggucaagcugaacagagaagaccugcugagaaagcagagaacauucgacaacggaagcaucccgcaccagauccaccugggagaacugcacgcaauccugagaagacaggaagacuucuacccguuccugaaggacaacagagaaaagaucgaaaagauccugacauucagaaucccguacuacgucggaccgcuggcaagaggaaacagcagauucgcauggaugacaagaaagagcgaagaaacaaucacaccguggaacuucgaagaagucgucgacaagggagcaagcgcacagagcuucaucgaaagaaugacaaacuucgacaagaaccugccgaacgaaaagguccugccgaagcacagccugcuguacgaauacuucacagucuacaacgaacugacaaaggucaaguacgucacagaaggaaugagaaagccggcauuccugagcggagaacagaagaaggcaaucgucgaccugcuguucaagacaaacagaaaggucacagucaagcagcugaaggaagacuacuucaagaagaucgaaugcuucgacagcgucgaaaucagcggagucgaagacagauucaacgcaagccugggaacauaccacgaccugcugaagaucaucaaggacaaggacuuccuggacaacgaagaaaacgaagacauccuggaagacaucguccugacacugacacuguucgaagacagagaaaugaucgaagaaagacugaagacauacgcacaccuguucgacgacaaggucaugaagcagcugaagagaagaagauacacaggauggggaagacugagcagaaagcugaucaacggaaucagagacaagcagagcggaaagacaauccuggacuuccugaagagcgacggauucgcaaacagaaacuucaugcagcugauccacgacgacagccugacauucaaggaagacauccagaaggcacaggucagcggacagggagacagccugcacgaacacaucgcaaaccuggcaggaagcccggcaaucaagaagggaauccugcagacagucaaggucgucgacgaacuggucaaggucaugggaagacacaagccggaaaacaucgucaucgaaauggcaagagaaaaccagacaacacagaagggacagaagaacagcagagaaagaaugaagagaaucgaagaaggaaucaaggaacugggaagccagauccugaaggaacacccggucgaaaacacacagcugcagaacgaaaagcuguaccuguacuaccugcagaacggaagagacauguacgucgaccaggaacuggacaucaacagacugagcgacuacgacgucgacgcaaucgucccgcagagcuuccugaaggacgacagcaucgacaacaagguccugacaagaagcgacaagaacagaggaaagagcgacaacgucccgagcgaagaagucgucaagaagaugaagaacuacuggagacagcugcugaacgcaaagcugaucacacagagaaaguucgacaaccugacaaaggcagagagaggaggacugagcgaacuggacaaggcaggauucaucaagagacagcuggucgaaacaagacagaucacaaagcacgucgcacagauccuggacagcagaaugaacacaaaguacgacgaaaacgacaagcugaucagagaagucaaggucaucacacugaagagcaagcuggucagcgacuucagaaaggacuuccaguucuacaaggucagagaaaucaacaacuaccaccacgcacacgacgcauaccugaacgcagucgucggaacagcacugaucaagaaguacccgaagcuggaaagcgaauucgucuacggagacuacaaggucuacgacgucagaaagaugaucgcaaagagcgaacaggaaaucggaaaggcaacagcaaaguacuucuucuacagcaacaucaugaacuucuucaagacagaaaucacacuggcaaacggagaaaucagaaagagaccgcugaucgaaacaaacggagaaacaggagaaaucgucugggacaagggaagagacuucgcaacagucagaaagguccugagcaugccgcaggucaacaucgucaagaagacagaaguccagacaggaggauucagcaaggaaagcauccugccgaagagaaacagcgacaagcugaucgcaagaaagaaggacugggacccgaagaaguacggaggauucgacagcccgacagucgcauacagcguccuggucgucgcaaaggucgaaaagggaaagagcaagaagcugaagagcgucaaggaacugcugggaaucacaaucauggaaagaagcagcuucgaaaagaacccgaucgacuuccuggaagcaaagggauacaaggaagucaagaaggaccugaucaucaagcugccgaaguacagccuguucgaacuggaaaacggaagaaagagaaugcuggcaagcgcaggagaacugcagaagggaaacgaacuggcacugccgagcaaguacgucaacuuccuguaccuggcaagccacuacgaaaagcugaagggaagcccggaagacaacgaacagaagcagcuguucgucgaacagcacaagcacuaccuggacgaaaucaucgaacagaucagcgaauucagcaagagagucauccuggcagacgcaaaccuggacaagguccugagcgcauacaacaagcacagagacaagccgaucagagaacaggcagaaaacaucauccaccuguucacacugacaaaccugggagcaccggcagcauucaaguacuucgacacaacaaucgacagaaagagauacacaagcacaaaggaaguccuggacgcaacacugauccaccagagcaucacaggacuguacgaaacaagaaucgaccugagccagcugggaggagacuag

SEQ ID NO: 3516 - RNA, 4113 nt, Artificial Sequence
  Synthetic
gacaagaaguacagcaucggacuggcaaucggaacaaacagcgucggaugggcagucaucacagacgaauacaaggucccgagcaagaaguucaagguccugggaaacacagacagacacagcaucaagaagaaccugaucggagcacugcuguucgacagcggagaaacagcagaagcaacaagacugaagagaacagcaagaagaagauacacaagaagaaagaacagaaucugcuaccugcaggaaaucuucagcaacgaaauggcaaaggucgacgacagcuucuuccacagacuggaagaaagcuuccuggucgaagaagacaagaagcacgaaagacacccgaucuucggaaacaucgucgacgaagucgcauaccacgaaaaguacccgacaaucuaccaccugagaaagaagcuggucgacagcacagacaaggcagaccugagacugaucuaccuggcacuggcacacaugaucaaguucagaggacacuuccugaucgaaggagaccugaacccggacaacagcgacgucgacaagcuguucauccagcugguccagacauacaaccagcuguucgaagaaaacccgaucaacgcaagcggagucgacgcaaaggcaauccugagcgcaagacugagcaagagcagaagacuggaaaaccugaucgcacagcugccgggagaaaagaagaacggacuguucggaaaccugaucgcacugagccugggacugacaccgaacuucaagagcaacuucgaccuggcagaagacgcaaagcugcagcugagcaaggacacauacgacgacgaccuggacaaccugcuggcacagaucggagaccaguacgcagaccuguuccuggcagcaaagaaccugagcgacgcaauccugcugagcgacauccugagagucaacacagaaaucacaaaggcaccgcugagcgcaagcaugaucaagagauacgacgaacaccaccaggaccugacacugcugaaggcacuggucagacagcagcugccggaaaaguacaaggaaaucuucuucgaccagagcaagaacggauacgcaggauacaucgacggaggagcaagccaggaagaauucuacaaguucaucaagccgauccuggaaaagauggacggaacagaagaacugcuggucaagcugaacagagaagaccugcugagaaagcagagaacauucgacaacggaagcaucccgcaccagauccaccugggagaacugcacgcaauccugagaagacaggaagacuucuacccguuccugaaggacaacagagaaaagaucgaaaagauccugacauucagaaucccguacuacgucggaccgcuggcaagaggaaacagcagauucgcauggaugacaagaaagagcgaagaaacaaucacaccguggaacuucgaagaagucgucgacaagggagcaagcgcacagagcuucaucgaaagaaugacaaacuucgacaagaaccugccgaacgaaaagguccugccgaagcacagccugcuguacgaauacuucacagucuacaacgaacugacaaaggucaaguacgucacagaaggaaugagaaagccggcauuccugagcggagaacagaagaaggcaaucgucgaccugcuguucaagacaaacagaaaggucacagucaagcagcugaaggaagacuacuucaagaagaucgaaugcuucgacagcgucgaaaucagcggagucgaagacagauucaacgcaagccugggaacauaccacgaccugcugaagaucaucaaggacaaggacuuccuggacaacgaagaaaacgaagacauccuggaagacaucguccugacacugacacuguucgaagacagagaaaugaucgaagaaagacugaagacauacgcacaccuguucgacgacaaggucaugaagcagcugaagagaagaagauacacaggauggggaagacugagcagaaagcugaucaacggaaucagagacaagcagagcggaaagacaauccuggacuuccugaagagcgacggauucgcaaacagaaacuucaugcagcugauccacgacgacagccugacauucaaggaagacauccagaaggcacaggucagcggacagggagacagccugcacgaacacaucgcaaaccuggcaggaagcccggcaaucaagaagggaauccugcagacagucaaggucgucgacgaacuggucaaggucaugggaagacacaagccggaaaacaucgucaucgaaauggcaagagaaaaccagacaacacagaagggacagaagaacagcagagaaagaaugaagagaaucgaagaaggaaucaaggaacugggaagccagauccugaaggaacacccggucgaaaacacacagcugcagaacgaaaagcuguaccuguacuaccugcagaacggaagagacauguacgucgaccaggaacuggacaucaacagacugagcgacuacgacgucgacgcaaucgucccgcagagcuuccugaaggacgacagcaucgacaacaagguccugacaagaagcgacaagaacagaggaaagagcgacaacgucccgagcgaagaagucgucaagaagaugaagaacuacuggagacagcugcugaacgcaaagcugaucacacagagaaaguucgacaaccugacaaaggcagagagaggaggacugagcgaacuggacaaggcaggauucaucaagagacagcuggucgaaacaagacagaucacaaagcacgucgcacagauccuggacagcagaaugaacacaaaguacgacgaaaacgacaagcugaucagagaagucaaggucaucacacugaagagcaagcuggucagcgacuucagaaaggacuuccaguucuacaaggucagagaaaucaacaacuaccaccacgcacacgacgcauaccugaacgcagucgucggaacagcacugaucaagaaguacccgaagcuggaaagcgaauucgucuacggagacuacaaggucuacgacgucagaaagaugaucgcaaagagcgaacaggaaaucggaaaggcaacagcaaaguacuucuucuacagcaacaucaugaacuucuucaagacagaaaucacacuggcaaacggagaaaucagaaagagaccgcugaucgaaacaaacggagaaacaggagaaaucgucugggacaagggaagagacuucgcaacagucagaaagguccugagcaugccgcaggucaacaucgucaagaagacagaaguccagacaggaggauucagcaaggaaagcauccugccgaagagaaacagcgacaagcugaucgcaagaaagaaggacugggacccgaagaaguacggaggauucgacagcccgacagucgcauacagcguccuggucgucgcaaaggucgaaaagggaaagagcaagaagcugaagagcgucaaggaacugcugggaaucacaaucauggaaagaagcagcuucgaaaagaacccgaucgacuuccuggaagcaaagggauacaaggaagucaagaaggaccugaucaucaagcugccgaaguacagccuguucgaacuggaaaacggaagaaagagaaugcuggcaagcgcaggagaacugcagaagggaaacgaacuggcacugccgagcaaguacgucaacuuccuguaccuggcaagccacuacgaaaagcugaagggaagcccggaagacaacgaacagaagcagcuguucgucgaacagcacaagcacuaccuggacgaaaucaucgaacagaucagcgaauucagcaagagagucauccuggcagacgcaaaccuggacaagguccugagcgcauacaacaagcacagagacaagccgaucagagaacaggcagaaaacaucauccaccuguucacacugacaaaccugggagcaccggcagcauucaaguacuucgacacaacaaucgacagaaagagauacacaagcacaaaggaaguccuggacgcaacacugauccaccagagcaucacaggacuguacgaaacaagaaucgaccugagccagcugggaggagacggaggaggaagc

SEQ ID NO: 3517 - RNA, 4179 nt, Artificial Sequence
  Synthetic
auggacaagaaguacagcaucggacuggacaucggaacaaacagcgucggaugggcagucaucacagacgaauacaaggucccgagcaagaaguucaagguccugggaaacacagacagacacagcaucaagaagaaccugaucggagcacugcuguucgacagcggagaaacagcagaagcaacaagacugaagagaacagcaagaagaagauacacaagaagaaagaacagaaucugcuaccugcaggaaaucuucagcaacgaaauggcaaaggucgacgacagcuucuuccacagacuggaagaaagcuuccuggucgaagaagacaagaagcacgaaagacacccgaucuucggaaacaucgucgacgaagucgcauaccacgaaaaguacccgacaaucuaccaccugagaaagaagcuggucgacagcacagacaaggcagaccugagacugaucuaccuggcacuggcacacaugaucaaguucagaggacacuuccugaucgaaggagaccugaacccggacaacagcgacgucgacaagcuguucauccagcugguccagacauacaaccagcuguucgaagaaaacccgaucaacgcaagcggagucgacgcaaaggcaauccugagcgcaagacugagcaagagcagaagacuggaaaaccugaucgcacagcugccgggagaaaagaagaacggacuguucggaaaccugaucgcacugagccugggacugacaccgaacuucaagagcaacuucgaccuggcagaagacgcaaagcugcagcugagcaaggacacauacgacgacgaccuggacaaccugcuggcacagaucggagaccaguacgcagaccuguuccuggcagcaaagaaccugagcgacgcaauccugcugagcgacauccugagagucaacacagaaaucacaaaggcaccgcugagcgcaagcaugaucaagagauacgacgaacaccaccaggaccugacacugcugaaggcacuggucagacagcagcugccggaaaaguacaaggaaaucuucuucgaccagagcaagaacggauacgcaggauacaucgacggaggagcaagccaggaagaauucuacaaguucaucaagccgauccuggaaaagauggacggaacagaagaacugcuggucaagcugaacagagaagaccugcugagaaagcagagaacauucgacaacggaagcaucccgcaccagauccaccugggagaacugcacgcaauccugagaagacaggaagacuucuacccguuccugaaggacaacagagaaaagaucgaaaagauccugacauucagaaucccguacuacgucggaccgcuggcaagaggaaacagcagauucgcauggaugacaagaaagagcgaagaaacaaucacaccguggaacuucgaagaagucgucgacaagggagcaagcgcacagagcuucaucgaaagaaugacaaacuucgacaagaaccugccgaacgaaaagguccugccgaagcacagccugcuguacgaauacuucacagucuacaacgaacugacaaaggucaaguacgucacagaaggaaugagaaagccggcauuccugagcggagaacagaagaaggcaaucgucgaccugcuguucaagacaaacagaaaggucacagucaagcagcugaaggaagacuacuucaagaagaucgaaugcuucgacagcgucgaaaucagcggagucgaagacagauucaacgcaagccugggaacauaccacgaccugcugaagaucaucaaggacaaggacuuccuggacaacgaagaaaacgaagacauccuggaagacaucguccugacacugacacuguucgaagacagagaaaugaucgaagaaagacugaagacauacgcacaccuguucgacgacaaggucaugaagcagcugaagagaagaagauacacaggauggggaagacugagcagaaagcugaucaacggaaucagagacaagcagagcggaaagacaauccuggacuuccugaagagcgacggauucgcaaacagaaacuucaugcagcugauccacgacgacagccugacauucaaggaagacauccagaaggcacaggucagcggacagggagacagccugcacgaacacaucgcaaaccuggcaggaagcccggcaaucaagaagggaauccugcagacagucaaggucgucgacgaacuggucaaggucaugggaagacacaagccggaaaacaucgucaucgaaauggcaagagaaaaccagacaacacagaagggacagaagaacagcagagaaagaaugaagagaaucgaagaaggaaucaaggaacugggaagccagauccugaaggaacacccggucgaaaacacacagcugcagaacgaaaagcuguaccuguacuaccugcagaacggaagagacauguacgucgaccaggaacuggacaucaacagacugagcgacuacgacgucgaccacaucgucccgcagagcuuccugaaggacgacagcaucgacaacaagguccugacaagaagcgacaagaacagaggaaagagcgacaacgucccgagcgaagaagucgucaagaagaugaagaacuacuggagacagcugcugaacgcaaagcugaucacacagagaaaguucgacaaccugacaaaggcagagagaggaggacugagcgaacuggacaaggcaggauucaucaagagacagcuggucgaaacaagacagaucacaaagcacgucgcacagauccuggacagcagaaugaacacaaaguacgacgaaaacgacaagcugaucagagaagucaaggucaucacacugaagagcaagcuggucagcgacuucagaaaggacuuccaguucuacaaggucagagaaaucaacaacuaccaccacgcacacgacgcauaccugaacgcagucgucggaacagcacugaucaagaaguacccgaagcuggaaagcgaauucgucuacggagacuacaaggucuacgacgucagaaagaugaucgcaaagagcgaacaggaaaucggaaaggcaacagcaaaguacuucuucuacagcaacaucaugaacuucuucaagacagaaaucacacuggcaaacggagaaaucagaaagagaccgcugaucgaaacaaacggagaaacaggagaaaucgucugggacaagggaagagacuucgcaacagucagaaagguccugagcaugccgcaggucaacaucgucaagaagacagaaguccagacaggaggauucagcaaggaaagcauccugccgaagagaaacagcgacaagcugaucgcaagaaagaaggacugggacccgaagaaguacggaggauucgacagcccgacagucgcauacagcguccuggucgucgcaaaggucgaaaagggaaagagcaagaagcugaagagcgucaaggaacugcugggaaucacaaucauggaaagaagcagcuucgaaaagaacccgaucgacuuccuggaagcaaagggauacaaggaagucaagaaggaccugaucaucaagcugccgaaguacagccuguucgaacuggaaaacggaagaaagagaaugcuggcaagcgcaggagaacugcagaagggaaacgaacuggcacugccgagcaaguacgucaacuuccuguaccuggcaagccacuacgaaaagcugaagggaagcccggaagacaacgaacagaagcagcuguucgucgaacagcacaagcacuaccuggacgaaaucaucgaacagaucagcgaauucagcaagagagucauccuggcagacgcaaaccuggacaagguccugagcgcauacaacaagcacagagacaagccgaucagagaacaggcagaaaacaucauccaccuguucacacugacaaaccugggagcaccggcagcauucaaguacuucgacacaacaaucgacagaaagagauacacaagcacaaaggaaguccuggacgcaacacugauccaccagagcaucacaggacuguacgaaacaagaaucgaccugagccagcugggaggagacggaagcggaagcccgaagaagaagagaaaggucgacggaagcccgaagaagaagagaaaggucgacagcggauag

SEQ ID NO: 3518 - RNA, 4173 nt, Artificial Sequence
  Synthetic
gacaagaaguacagcaucggacuggacaucggaacaaacagcgucggaugggcagucaucacagacgaauacaaggucccgagcaagaaguucaagguccugggaaacacagacagacacagcaucaagaagaaccugaucggagcacugcuguucgacagcggagaaacagcagaagcaacaagacugaagagaacagcaagaagaagauacacaagaagaaagaacagaaucugcuaccugcaggaaaucuucagcaacgaaauggcaaaggucgacgacagcuucuuccacagacuggaagaaagcuuccuggucgaagaagacaagaagcacgaaagacacccgaucuucggaaacaucgucgacgaagucgcauaccacgaaaaguacccgacaaucuaccaccugagaaagaagcuggucgacagcacagacaaggcagaccugagacugaucuaccuggcacuggcacacaugaucaaguucagaggacacuuccugaucgaaggagaccugaacccggacaacagcgacgucgacaagcuguucauccagcugguccagacauacaaccagcuguucgaagaaaacccgaucaacgcaagcggagucgacgcaaaggcaauccugagcgcaagacugagcaagagcagaagacuggaaaaccugaucgcacagcugccgggagaaaagaagaacggacuguucggaaaccugaucgcacugagccugggacugacaccgaacuucaagagcaacuucgaccuggcagaagacgcaaagcugcagcugagcaaggacacauacgacgacgaccuggacaaccugcuggcacagaucggagaccaguacgcagaccuguuccuggcagcaaagaaccugagcgacgcaauccugcugagcgacauccugagagucaacacagaaaucacaaaggcaccgcugagcgcaagcaugaucaagagauacgacgaacaccaccaggaccugacacugcugaaggcacuggucagacagcagcugccggaaaaguacaaggaaaucuucuucgaccagagcaagaacggauacgcaggauacaucgacggaggagcaagccaggaagaauucuacaaguucaucaagccgauccuggaaaagauggacggaacagaagaacugcuggucaagcugaacagagaagaccugcugagaaagcagagaacauucgacaacggaagcaucccgcaccagauccaccugggagaacugcacgcaauccugagaagacaggaagacuucuacccguuccugaaggacaacagagaaaagaucgaaaagauccugacauucagaaucccguacuacgucggaccgcuggcaagaggaaacagcagauucgcauggaugacaagaaagagcgaagaaacaaucacaccguggaacuucgaagaagucgucgacaagggagcaagcgcacagagcuucaucgaaagaaugacaaacuucgacaagaaccugccgaacgaaaagguccugccgaagcacagccugcuguacgaauacuucacagucuacaacgaacugacaaaggucaaguacgucacagaaggaaugagaaagccggcauuccugagcggagaacagaagaaggcaaucgucgaccugcuguucaagacaaacagaaaggucacagucaagcagcugaaggaagacuacuucaagaagaucgaaugcuucgacagcgucgaaaucagcggagucgaagacagauucaacgcaagccugggaacauaccacgaccugcugaagaucaucaaggacaaggacuuccuggacaacgaagaaaacgaagacauccuggaagacaucguccugacacugacacuguucgaagacagagaaaugaucgaagaaagacugaagacauacgcacaccuguucgacgacaaggucaugaagcagcugaagagaagaagauacacaggauggggaagacugagcagaaagcugaucaacggaaucagagacaagcagagcggaaagacaauccuggacuuccugaagagcgacggauucgcaaacagaaacuucaugcagcugauccacgacgacagccugacauucaaggaagacauccagaaggcacaggucagcggacagggagacagccugcacgaacacaucgcaaaccuggcaggaagcccggcaaucaagaagggaauccugcagacagucaaggucgucgacgaacuggucaaggucaugggaagacacaagccggaaaacaucgucaucgaaauggcaagagaaaaccagacaacacagaagggacagaagaacagcagagaaagaaugaagagaaucgaagaaggaaucaaggaacugggaagccagauccugaaggaacacccggucgaaaacacacagcugcagaacgaaaagcuguaccuguacuaccugcagaacggaagagacauguacgucgaccaggaacuggacaucaacagacugagcgacuacgacgucgaccacaucgucccgcagagcuuccugaaggacgacagcaucgacaacaagguccugacaagaagcgacaagaacagaggaaagagcgacaacgucccgagcgaagaagucgucaagaagaugaagaacuacuggagacagcugcugaacgcaaagcugaucacacagagaaaguucgacaaccugacaaaggcagagagaggaggacugagcgaacuggacaaggcaggauucaucaagagacagcuggucgaaacaagacagaucacaaagcacgucgcacagauccuggacagcagaaugaacacaaaguacgacgaaaacgacaagcugaucagagaagucaaggucaucacacugaagagcaagcuggucagcgacuucagaaaggacuuccaguucuacaaggucagagaaaucaacaacuaccaccacgcacacgacgcauaccugaacgcagucgucggaacagcacugaucaagaaguacccgaagcuggaaagcgaauucgucuacggagacuacaaggucuacgacgucagaaagaugaucgcaaagagcgaacaggaaaucggaaaggcaacagcaaaguacuucuucuacagcaacaucaugaacuucuucaagacagaaaucacacuggcaaacggagaaaucagaaagagaccgcugaucgaaacaaacggagaaacaggagaaaucgucugggacaagggaagagacuucgcaacagucagaaagguccugagcaugccgcaggucaacaucgucaagaagacagaaguccagacaggaggauucagcaaggaaagcauccugccgaagagaaacagcgacaagcugaucgcaagaaagaaggacugggacccgaagaaguacggaggauucgacagcccgacagucgcauacagcguccuggucgucgcaaaggucgaaaagggaaagagcaagaagcugaagagcgucaaggaacugcugggaaucacaaucauggaaagaagcagcuucgaaaagaacccgaucgacuuccuggaagcaaagggauacaaggaagucaagaaggaccugaucaucaagcugccgaaguacagccuguucgaacuggaaaacggaagaaagagaaugcuggcaagcgcaggagaacugcagaagggaaacgaacuggcacugccgagcaaguacgucaacuuccuguaccuggcaagccacuacgaaaagcugaagggaagcccggaagacaacgaacagaagcagcuguucgucgaacagcacaagcacuaccuggacgaaaucaucgaacagaucagcgaauucagcaagagagucauccuggcagacgcaaaccuggacaagguccugagcgcauacaacaagcacagagacaagccgaucagagaacaggcagaaaacaucauccaccuguucacacugacaaaccugggagcaccggcagcauucaaguacuucgacacaacaaucgacagaaagagauacacaagcacaaaggaaguccuggacgcaacacugauccaccagagcaucacaggacuguacgaaacaagaaucgaccugagccagcugggaggagacggaagcggaagcccgaagaagaagagaaaggucgacggaagcccgaagaagaagagaaaggucgacagcgga

SEQ ID NO: 3519 - RNA, 4179 nt, Artificial Sequence
  Synthetic
auggacaagaaguacagcaucggacuggcaaucggaacaaacagcgucggaugggcagucaucacagacgaauacaaggucccgagcaagaaguucaagguccugggaaacacagacagacacagcaucaagaagaaccugaucggagcacugcuguucgacagcggagaaacagcagaagcaacaagacugaagagaacagcaagaagaagauacacaagaagaaagaacagaaucugcuaccugcaggaaaucuucagcaacgaaauggcaaaggucgacgacagcuucuuccacagacuggaagaaagcuuccuggucgaagaagacaagaagcacgaaagacacccgaucuucggaaacaucgucgacgaagucgcauaccacgaaaaguacccgacaaucuaccaccugagaaagaagcuggucgacagcacagacaaggcagaccugagacugaucuaccuggcacuggcacacaugaucaaguucagaggacacuuccugaucgaaggagaccugaacccggacaacagcgacgucgacaagcuguucauccagcugguccagacauacaaccagcuguucgaagaaaacccgaucaacgcaagcggagucgacgcaaaggcaauccugagcgcaagacugagcaagagcagaagacuggaaaaccugaucgcacagcugccgggagaaaagaagaacggacuguucggaaaccugaucgcacugagccugggacugacaccgaacuucaagagcaacuucgaccuggcagaagacgcaaagcugcagcugagcaaggacacauacgacgacgaccuggacaaccugcuggcacagaucggagaccaguacgcagaccuguuccuggcagcaaagaaccugagcgacgcaauccugcugagcgacauccugagagucaacacagaaaucacaaaggcaccgcugagcgcaagcaugaucaagagauacgacgaacaccaccaggaccugacacugcugaaggcacuggucagacagcagcugccggaaaaguacaaggaaaucuucuucgaccagagcaagaacggauacgcaggauacaucgacggaggagcaagccaggaagaauucuacaaguucaucaagccgauccuggaaaagauggacggaacagaagaacugcuggucaagcugaacagagaagaccugcugagaaagcagagaacauucgacaacggaagcaucccgcaccagauccaccugggagaacugcacgcaauccugagaagacaggaagacuucuacccguuccugaaggacaacagagaaaagaucgaaaagauccugacauucagaaucccguacuacgucggaccgcuggcaagaggaaacagcagauucgcauggaugacaagaaagagcgaagaaacaaucacaccguggaacuucgaagaagucgucgacaagggagcaagcgcacagagcuucaucgaaagaaugacaaacuucgacaagaaccugccgaacgaaaagguccugccgaagcacagccugcuguacgaauacuucacagucuacaacgaacugacaaaggucaaguacgucacagaaggaaugagaaagccggcauuccugagcggagaacagaagaaggcaaucgucgaccugcuguucaagacaaacagaaaggucacagucaagcagcugaaggaagacuacuucaagaagaucgaaugcuucgacagcgucgaaaucagcggagucgaagacagauucaacgcaagccugggaacauaccacgaccugcugaagaucaucaaggacaaggacuuccuggacaacgaagaaaacgaagacauccuggaagacaucguccugacacugacacuguucgaagacagagaaaugaucgaagaaagacugaagacauacgcacaccuguucgacgacaaggucaugaagcagcugaagagaagaagauacacaggauggggaagacugagcagaaagcugaucaacggaaucagagacaagcagagcggaaagacaauccuggacuuccugaagagcgacggauucgcaaacagaaacuucaugcagcugauccacgacgacagccugacauucaaggaagacauccagaaggcacaggucagcggacagggagacagccugcacgaacacaucgcaaaccuggcaggaagcccggcaaucaagaagggaauccugcagacagucaaggucgucgacgaacuggucaaggucaugggaagacacaagccggaaaacaucgucaucgaaauggcaagagaaaaccagacaacacagaagggacagaagaacagcagagaaagaaugaagagaaucgaagaaggaaucaaggaacugggaagccagauccugaaggaacacccggucgaaaacacacagcugcagaacgaaaagcuguaccuguacuaccugcagaacggaagagacauguacgucgaccaggaacuggacaucaacagacugagcgacuacgacgucgaccacaucgucccgcagagcuuccugaaggacgacagcaucgacaacaagguccugacaagaagcgacaagaacagaggaaagagcgacaacgucccgagcgaagaagucgucaagaagaugaagaacuacuggagacagcugcugaacgcaaagcugaucacacagagaaaguucgacaaccugacaaaggcagagagaggaggacugagcgaacuggacaaggcaggauucaucaagagacagcuggucgaaacaagacagaucacaaagcacgucgcacagauccuggacagcagaaugaacacaaaguacgacgaaaacgacaagcugaucagagaagucaaggucaucacacugaagagcaagcuggucagcgacuucagaaaggacuuccaguucuacaaggucagagaaaucaacaacuaccaccacgcacacgacgcauaccugaacgcagucgucggaacagcacugaucaagaaguacccgaagcuggaaagcgaauucgucuacggagacuacaaggucuacgacgucagaaagaugaucgcaaagagcgaacaggaaaucggaaaggcaacagcaaaguacuucuucuacagcaacaucaugaacuucuucaagacagaaaucacacuggcaaacggagaaaucagaaagagaccgcugaucgaaacaaacggagaaacaggagaaaucgucugggacaagggaagagacuucgcaacagucagaaagguccugagcaugccgcaggucaacaucgucaagaagacagaaguccagacaggaggauucagcaaggaaagcauccugccgaagagaaacagcgacaagcugaucgcaagaaagaaggacugggacccgaagaaguacggaggauucgacagcccgacagucgcauacagcguccuggucgucgcaaaggucgaaaagggaaagagcaagaagcugaagagcgucaaggaacugcugggaaucacaaucauggaaagaagcagcuucgaaaagaacccgaucgacuuccuggaagcaaagggauacaaggaagucaagaaggaccugaucaucaagcugccgaaguacagccuguucgaacuggaaaacggaagaaagagaaugcuggcaagcgcaggagaacugcagaagggaaacgaacuggcacugccgagcaaguacgucaacuuccuguaccuggcaagccacuacgaaaagcugaagggaagcccggaagacaacgaacagaagcagcuguucgucgaacagcacaagcacuaccuggacgaaaucaucgaacagaucagcgaauucagcaagagagucauccuggcagacgcaaaccuggacaagguccugagcgcauacaacaagcacagagacaagccgaucagagaacaggcagaaaacaucauccaccuguucacacugacaaaccugggagcaccggcagcauucaaguacuucgacacaacaaucgacagaaagagauacacaagcacaaaggaaguccuggacgcaacacugauccaccagagcaucacaggacuguacgaaacaagaaucgaccugagccagcugggaggagacggaagcggaagcccgaagaagaagagaaaggucgacggaagcccgaagaagaagagaaaggucgacagcggauag

SEQ ID NO: 3520 - RNA, 4173 nt, Artificial Sequence
  Synthetic
gacaagaaguacagcaucggacuggcaaucggaacaaacagcgucggaugggcagucaucacagacgaauacaaggucccgagcaagaaguucaagguccugggaaacacagacagacacagcaucaagaagaaccugaucggagcacugcuguucgacagcggagaaacagcagaagcaacaagacugaagagaacagcaagaagaagauacacaagaagaaagaacagaaucugcuaccugcaggaaaucuucagcaacgaaauggcaaaggucgacgacagcuucuuccacagacuggaagaaagcuuccuggucgaagaagacaagaagcacgaaagacacccgaucuucggaaacaucgucgacgaagucgcauaccacgaaaaguacccgacaaucuaccaccugagaaagaagcuggucgacagcacagacaaggcagaccugagacugaucuaccuggcacuggcacacaugaucaaguucagaggacacuuccugaucgaaggagaccugaacccggacaacagcgacgucgacaagcuguucauccagcugguccagacauacaaccagcuguucgaagaaaacccgaucaacgcaagcggagucgacgcaaaggcaauccugagcgcaagacugagcaagagcagaagacuggaaaaccugaucgcacagcugccgggagaaaagaagaacggacuguucggaaaccugaucgcacugagccugggacugacaccgaacuucaagagcaacuucgaccuggcagaagacgcaaagcugcagcugagcaaggacacauacgacgacgaccuggacaaccugcuggcacagaucggagaccaguacgcagaccuguuccuggcagcaaagaaccugagcgacgcaauccugcugagcgacauccugagagucaacacagaaaucacaaaggcaccgcugagcgcaagcaugaucaagagauacgacgaacaccaccaggaccugacacugcugaaggcacuggucagacagcagcugccggaaaaguacaaggaaaucuucuucgaccagagcaagaacggauacgcaggauacaucgacggaggagcaagccaggaagaauucuacaaguucaucaagccgauccuggaaaagauggacggaacagaagaacugcuggucaagcugaacagagaagaccugcugagaaagcagagaacauucgacaacggaagcaucccgcaccagauccaccugggagaacugcacgcaauccugagaagacaggaagacuucuacccguuccugaaggacaacagagaaaagaucgaaaagauccugacauucagaaucccguacuacgucggaccgcuggcaagaggaaacagcagauucgcauggaugacaagaaagagcgaagaaacaaucacaccguggaacuucgaagaagucgucgacaagggagcaagcgcacagagcuucaucgaaagaaugacaaacuucgacaagaaccugccgaacgaaaagguccugccgaagcacagccugcuguacgaauacuucacagucuacaacgaacugacaaaggucaaguacgucacagaaggaaugagaaagccggcauuccugagcggagaacagaagaaggcaaucgucgaccugcuguucaagacaaacagaaaggucacagucaagcagcugaaggaagacuacuucaagaagaucgaaugcuucgacagcgucgaaaucagcggagucgaagacagauucaacgcaagccugggaacauaccacgaccugcugaagaucaucaaggacaaggacuuccuggacaacgaagaaaacgaagacauccuggaagacaucguccugacacugacacuguucgaagacagagaaaugaucgaagaaagacugaagacauacgcacaccuguucgacgacaaggucaugaagcagcugaagagaagaagauacacaggauggggaagacugagcagaaagcugaucaacggaaucagagacaagcagagcggaaagacaauccuggacuuccugaagagcgacggauucgcaaacagaaacuucaugcagcugauccacgacgacagccugacauucaaggaagacauccagaaggcacaggucagcggacagggagacagccugcacgaacacaucgcaaaccuggcaggaagcccggcaaucaagaagggaauccugcagacagucaaggucgucgacgaacuggucaaggucaugggaagacacaagccggaaaacaucgucaucgaaauggcaagagaaaaccagacaacacagaagggacagaagaacagcagagaaagaaugaagagaaucgaagaaggaaucaaggaacugggaagccagauccugaaggaacacccggucgaaaacacacagcugcagaacgaaaagcuguaccuguacuaccugcagaacggaagagacauguacgucgaccaggaacuggacaucaacagacugagcgacuacgacgucgaccacaucgucccgcagagcuuccugaaggacgacagcaucgacaacaagguccugacaagaagcgacaagaacagaggaaagagcgacaacgucccgagcgaagaagucgucaagaagaugaagaacuacuggagacagcugcugaacgcaaagcugaucacacagagaaaguucgacaaccugacaaaggcagagagaggaggacugagcgaacuggacaaggcaggauucaucaagagacagcuggucgaaacaagacagaucacaaagcacgucgcacagauccuggacagcagaaugaacacaaaguacgacgaaaacgacaagcugaucagagaagucaaggucaucacacugaagagcaagcuggucagcgacuucagaaaggacuuccaguucuacaaggucagagaaaucaacaacuaccaccacgcacacgacgcauaccugaacgcagucgucggaacagcacugaucaagaaguacccgaagcuggaaagcgaauucgucuacggagacuacaaggucuacgacgucagaaagaugaucgcaaagagcgaacaggaaaucggaaaggcaacagcaaaguacuucuucuacagcaacaucaugaacuucuucaagacagaaaucacacuggcaaacggagaaaucagaaagagaccgcugaucgaaacaaacggagaaacaggagaaaucgucugggacaagggaagagacuucgcaacagucagaaagguccugagcaugccgcaggucaacaucgucaagaagacagaaguccagacaggaggauucagcaaggaaagcauccugccgaagagaaacagcgacaagcugaucgcaagaaagaaggacugggacccgaagaaguacggaggauucgacagcccgacagucgcauacagcguccuggucgucgcaaaggucgaaaagggaaagagcaagaagcugaagagcgucaaggaacugcugggaaucacaaucauggaaagaagcagcuucgaaaagaacccgaucgacuuccuggaagcaaagggauacaaggaagucaagaaggaccugaucaucaagcugccgaaguacagccuguucgaacuggaaaacggaagaaagagaaugcuggcaagcgcaggagaacugcagaagggaaacgaacuggcacugccgagcaaguacgucaacuuccuguaccuggcaagccacuacgaaaagcugaagggaagcccggaagacaacgaacagaagcagcuguucgucgaacagcacaagcacuaccuggacgaaaucaucgaacagaucagcgaauucagcaagagagucauccuggcagacgcaaaccuggacaagguccugagcgcauacaacaagcacagagacaagccgaucagagaacaggcagaaaacaucauccaccuguucacacugacaaaccugggagcaccggcagcauucaaguacuucgacacaacaaucgacagaaagagauacacaagcacaaaggaaguccuggacgcaacacugauccaccagagcaucacaggacuguacgaaacaagaaucgaccugagccagcugggaggagacggaagcggaagcccgaagaagaagagaaaggucgacggaagcccgaagaagaagagaaaggucgacagcgga

SEQ ID NO: 3521 - RNA, 4179 nt, Artificial Sequence
  Synthetic
auggacaagaaguacagcaucggacuggcaaucggaacaaacagcgucggaugggcagucaucacagacgaauacaaggucccgagcaagaaguucaagguccugggaaacacagacagacacagcaucaagaagaaccugaucggagcacugcuguucgacagcggagaaacagcagaagcaacaagacugaagagaacagcaagaagaagauacacaagaagaaagaacagaaucugcuaccugcaggaaaucuucagcaacgaaauggcaaaggucgacgacagcuucuuccacagacuggaagaaagcuuccuggucgaagaagacaagaagcacgaaagacacccgaucuucggaaacaucgucgacgaagucgcauaccacgaaaaguacccgacaaucuaccaccugagaaagaagcuggucgacagcacagacaaggcagaccugagacugaucuaccuggcacuggcacacaugaucaaguucagaggacacuuccugaucgaaggagaccugaacccggacaacagcgacgucgacaagcuguucauccagcugguccagacauacaaccagcuguucgaagaaaacccgaucaacgcaagcggagucgacgcaaaggcaauccugagcgcaagacugagcaagagcagaagacuggaaaaccugaucgcacagcugccgggagaaaagaagaacggacuguucggaaaccugaucgcacugagccugggacugacaccgaacuucaagagcaacuucgaccuggcagaagacgcaaagcugcagcugagcaaggacacauacgacgacgaccuggacaaccugcuggcacagaucggagaccaguacgcagaccuguuccuggcagcaaagaaccugagcgacgcaauccugcugagcgacauccugagagucaacacagaaaucacaaaggcaccgcugagcgcaagcaugaucaagagauacgacgaacaccaccaggaccugacacugcugaaggcacuggucagacagcagcugccggaaaaguacaaggaaaucuucuucgaccagagcaagaacggauacgcaggauacaucgacggaggagcaagccaggaagaauucuacaaguucaucaagccgauccuggaaaagauggacggaacagaagaacugcuggucaagcugaacagagaagaccugcugagaaagcagagaacauucgacaacggaagcaucccgcaccagauccaccugggagaacugcacgcaauccugagaagacaggaagacuucuacccguuccugaaggacaacagagaaaagaucgaaaagauccugacauucagaaucccguacuacgucggaccgcuggcaagaggaaacagcagauucgcauggaugacaagaaagagcgaagaaacaaucacaccguggaacuucgaagaagucgucgacaagggagcaagcgcacagagcuucaucgaaagaaugacaaacuucgacaagaaccugccgaacgaaaagguccugccgaagcacagccugcuguacgaauacuucacagucuacaacgaacugacaaaggucaaguacgucacagaaggaaugagaaagccggcauuccugagcggagaacagaagaaggcaaucgucgaccugcuguucaagacaaacagaaaggucacagucaagcagcugaaggaagacuacuucaagaagaucgaaugcuucgacagcgucgaaaucagcggagucgaagacagauucaacgcaagccugggaacauaccacgaccugcugaagaucaucaaggacaaggacuuccuggacaacgaagaaaacgaagacauccuggaagacaucguccugacacugacacuguucgaagacagagaaaugaucgaagaaagacugaagacauacgcacaccuguucgacgacaaggucaugaagcagcugaagagaagaagauacacaggauggggaagacugagcagaaagcugaucaacggaaucagagacaagcagagcggaaagacaauccuggacuuccugaagagcgacggauucgcaaacagaaacuucaugcagcugauccacgacgacagccugacauucaaggaagacauccagaaggcacaggucagcggacagggagacagccugcacgaacacaucgcaaaccuggcaggaagcccggcaaucaagaagggaauccugcagacagucaaggucgucgacgaacuggucaaggucaugggaagacacaagccggaaaacaucgucaucgaaauggcaagagaaaaccagacaacacagaagggacagaagaacagcagagaaagaaugaagagaaucgaagaaggaaucaaggaacugggaagccagauccugaaggaacacccggucgaaaacacacagcugcagaacgaaaagcuguaccuguacuaccugcagaacggaagagacauguacgucgaccaggaacuggacaucaacagacugagcgacuacgacgucgacgcaaucgucccgcagagcuuccugaaggacgacagcaucgacaacaagguccugacaagaagcgacaagaacagaggaaagagcgacaacgucccgagcgaagaagucgucaagaagaugaagaacuacuggagacagcugcugaacgcaaagcugaucacacagagaaaguucgacaaccugacaaaggcagagagaggaggacugagcgaacuggacaaggcaggauucaucaagagacagcuggucgaaacaagacagaucacaaagcacgucgcacagauccuggacagcagaaugaacacaaaguacgacgaaaacgacaagcugaucagagaagucaaggucaucacacugaagagcaagcuggucagcgacuucagaaaggacuuccaguucuacaaggucagagaaaucaacaacuaccaccacgcacacgacgcauaccugaacgcagucgucggaacagcacugaucaagaaguacccgaagcuggaaagcgaauucgucuacggagacuacaaggucuacgacgucagaaagaugaucgcaaagagcgaacaggaaaucggaaaggcaacagcaaaguacuucuucuacagcaacaucaugaacuucuucaagacagaaaucacacuggcaaacggagaaaucagaaagagaccgcugaucgaaacaaacggagaaacaggagaaaucgucugggacaagggaagagacuucgcaacagucagaaagguccugagcaugccgcaggucaacaucgucaagaagacagaaguccagacaggaggauucagcaaggaaagcauccugccgaagagaaacagcgacaagcugaucgcaagaaagaaggacugggacccgaagaaguacggaggauucgacagcccgacagucgcauacagcguccuggucgucgcaaaggucgaaaagggaaagagcaagaagcugaagagcgucaaggaacugcugggaaucacaaucauggaaagaagcagcuucgaaaagaacccgaucgacuuccuggaagcaaagggauacaaggaagucaagaaggaccugaucaucaagcugccgaaguacagccuguucgaacuggaaaacggaagaaagagaaugcuggcaagcgcaggagaacugcagaagggaaacgaacuggcacugccgagcaaguacgucaacuuccuguaccuggcaagccacuacgaaaagcugaagggaagcccggaagacaacgaacagaagcagcuguucgucgaacagcacaagcacuaccuggacgaaaucaucgaacagaucagcgaauucagcaagagagucauccuggcagacgcaaaccuggacaagguccugagcgcauacaacaagcacagagacaagccgaucagagaacaggcagaaaacaucauccaccuguucacacugacaaaccugggagcaccggcagcauucaaguacuucgacacaacaaucgacagaaagagauacacaagcacaaaggaaguccuggacgcaacacugauccaccagagcaucacaggacuguacgaaacaagaaucgaccugagccagcugggaggagacggaagcggaagcccgaagaagaagagaaaggucgacggaagcccgaagaagaagagaaaggucgacagcggauag

SEQ ID NO: 3522 - RNA, 4173 nt, Artificial Sequence
  Synthetic
gacaagaaguacagcaucggacuggcaaucggaacaaacagcgucggaugggcagucaucacagacgaauacaaggucccgagcaagaaguucaagguccugggaaacacagacagacacagcaucaagaagaaccugaucggagcacugcuguucgacagcggagaaacagcagaagcaacaagacugaagagaacagcaagaagaagauacacaagaagaaagaacagaaucugcuaccugcaggaaaucuucagcaacgaaauggcaaaggucgacgacagcuucuuccacagacuggaagaaagcuuccuggucgaagaagacaagaagcacgaaagacacccgaucuucggaaacaucgucgacgaagucgcauaccacgaaaaguacccgacaaucuaccaccugagaaagaagcuggucgacagcacagacaaggcagaccugagacugaucuaccuggcacuggcacacaugaucaaguucagaggacacuuccugaucgaaggagaccugaacccggacaacagcgacgucgacaagcuguucauccagcugguccagacauacaaccagcuguucgaagaaaacccgaucaacgcaagcggagucgacgcaaaggcaauccugagcgcaagacugagcaagagcagaagacuggaaaaccugaucgcacagcugccgggagaaaagaagaacggacuguucggaaaccugaucgcacugagccugggacugacaccgaacuucaagagcaacuucgaccuggcagaagacgcaaagcugcagcugagcaaggacacauacgacgacgaccuggacaaccugcuggcacagaucggagaccaguacgcagaccuguuccuggcagcaaagaaccugagcgacgcaauccugcugagcgacauccugagagucaacacagaaaucacaaaggcaccgcugagcgcaagcaugaucaagagauacgacgaacaccaccaggaccugacacugcugaaggcacuggucagacagcagcugccggaaaaguacaaggaaaucuucuucgaccagagcaagaacggauacgcaggauacaucgacggaggagcaagccaggaagaauucuacaaguucaucaagccgauccuggaaaagauggacggaacagaagaacugcuggucaagcugaacagagaagaccugcugagaaagcagagaacauucgacaacggaagcaucccgcaccagauccaccugggagaacugcacgcaauccugagaagacaggaagacuucuacccguuccugaaggacaacagagaaaagaucgaaaagauccugacauucagaaucccguacuacgucggaccgcuggcaagaggaaacagcagauucgcauggaugacaagaaagagcgaagaaacaaucacaccguggaacuucgaagaagucgucgacaagggagcaagcgcacagagcuucaucgaaagaaugacaaacuucgacaagaaccugccgaacgaaaagguccugccgaagcacagccugcuguacgaauacuucacagucuacaacgaacugacaaaggucaaguacgucacagaaggaaugagaaagccggcauuccugagcggagaacagaagaaggcaaucgucgaccugcuguucaagacaaacagaaaggucacagucaagcagcugaaggaagacuacuucaagaagaucgaaugcuucgacagcgucgaaaucagcggagucgaagacagauucaacgcaagccugggaacauaccacgaccugcugaagaucaucaaggacaaggacuuccuggacaacgaagaaaacgaagacauccuggaagacaucguccugacacugacacuguucgaagacagagaaaugaucgaagaaagacugaagacauacgcacaccuguucgacgacaaggucaugaagcagcugaagagaagaagauacacaggauggggaagacugagcagaaagcugaucaacggaaucagagacaagcagagcggaaagacaauccuggacuuccugaagagcgacggauucgcaaacagaaacuucaugcagcugauccacgacgacagccugacauucaaggaagacauccagaaggcacaggucagcggacagggagacagccugcacgaacacaucgcaaaccuggcaggaagcccggcaaucaagaagggaauccugcagacagucaaggucgucgacgaacuggucaaggucaugggaagacacaagccggaaaacaucgucaucgaaauggcaagagaaaaccagacaacacagaagggacagaagaacagcagagaaagaaugaagagaaucgaagaaggaaucaaggaacugggaagccagauccugaaggaacacccggucgaaaacacacagcugcagaacgaaaagcuguaccuguacuaccugcagaacggaagagacauguacgucgaccaggaacuggacaucaacagacugagcgacuacgacgucgacgcaaucgucccgcagagcuuccugaaggacgacagcaucgacaacaagguccugacaagaagcgacaagaacagaggaaagagcgacaacgucccgagcgaagaagucgucaagaagaugaagaacuacuggagacagcugcugaacgcaaagcugaucacacagagaaaguucgacaaccugacaaaggcagagagaggaggacugagcgaacuggacaaggcaggauucaucaagagacagcuggucgaaacaagacagaucacaaagcacgucgcacagauccuggacagcagaaugaacacaaaguacgacgaaaacgacaagcugaucagagaagucaaggucaucacacugaagagcaagcuggucagcgacuucagaaaggacuuccaguucuacaaggucagagaaaucaacaacuaccaccacgcacacgacgcauaccugaacgcagucgucggaacagcacugaucaagaaguacccgaagcuggaaagcgaauucgucuacggagacuacaaggucuacgacgucagaaagaugaucgcaaagagcgaacaggaaaucggaaaggcaacagcaaaguacuucuucuacagcaacaucaugaacuucuucaagacagaaaucacacuggcaaacggagaaaucagaaagagaccgcugaucgaaacaaacggagaaacaggagaaaucgucugggacaagggaagagacuucgcaacagucagaaagguccugagcaugccgcaggucaacaucgucaagaagacagaaguccagacaggaggauucagcaaggaaagcauccugccgaagagaaacagcgacaagcugaucgcaagaaagaaggacugggacccgaagaaguacggaggauucgacagcccgacagucgcauacagcguccuggucgucgcaaaggucgaaaagggaaagagcaagaagcugaagagcgucaaggaacugcugggaaucacaaucauggaaagaagcagcuucgaaaagaacccgaucgacuuccuggaagcaaagggauacaaggaagucaagaaggaccugaucaucaagcugccgaaguacagccuguucgaacuggaaaacggaagaaagagaaugcuggcaagcgcaggagaacugcagaagggaaacgaacuggcacugccgagcaaguacgucaacuuccuguaccuggcaagccacuacgaaaagcugaagggaagcccggaagacaacgaacagaagcagcuguucgucgaacagcacaagcacuaccuggacgaaaucaucgaacagaucagcgaauucagcaagagagucauccuggcagacgcaaaccuggacaagguccugagcgcauacaacaagcacagagacaagccgaucagagaacaggcagaaaacaucauccaccuguucacacugacaaaccugggagcaccggcagcauucaaguacuucgacacaacaaucgacagaaagagauacacaagcacaaaggaaguccuggacgcaacacugauccaccagagcaucacaggacuguacgaaacaagaaucgaccugagccagcugggaggagacggaagcggaagcccgaagaagaagagaaaggucgacggaagcccgaagaagaagagaaaggucgacagcgga

SEQ ID NO: 3523 - DNA, 4411 bp, Artificial Sequence; identical to SEQ ID NO: 3501
  Synthetic

SEQ ID NO: 3524 - DNA, 4405 bp, Artificial Sequence
  Synthetic
gggtcccgcagtcggcgtccagcggctctgcttgttcgtgtgtgtgtcgttgcaggccttattcggatccatggacaagaagtacagcatcggactggacatcggaacaaacagcgtcggatgggcagtcatcacagacgaatacaaggtcccgagcaagaagttcaaggtcctgggaaacacagacagacacagcatcaagaagaacctgatcggagcactgctgttcgacagcggagaaacagcagaagcaacaagactgaagagaacagcaagaagaagatacacaagaagaaagaacagaatctgctacctgcaggaaatcttcagcaacgaaatggcaaaggtcgacgacagcttcttccacagactggaagaaagcttcctggtcgaagaagacaagaagcacgaaagacacccgatcttcggaaacatcgtcgacgaagtcgcataccacgaaaagtacccgacaatctaccacctgagaaagaagctggtcgacagcacagacaaggcagacctgagactgatctacctggcactggcacacatgatcaagttcagaggacacttcctgatcgaaggagacctgaacccggacaacagcgacgtcgacaagctgttcatccagctggtccagacatacaaccagctgttcgaagaaaacccgatcaacgcaagcggagtcgacgcaaaggcaatcctgagcgcaagactgagcaagagcagaagactggaaaacctgatcgcacagctgccgggagaaaagaagaacggactgttcggaaacctgatcgcactgagcctgggactgacaccgaacttcaagagcaacttcgacctggcagaagacgcaaagctgcagctgagcaaggacacatacgacgacgacctggacaacctgctggcacagatcggagaccagtacgcagacctgttcctggcagcaaagaacctgagcgacgcaatcctgctgagcgacatcctgagagtcaacacagaaatcacaaaggcaccgctgagcgcaagcatgatcaagagatacgacgaacaccaccaggacctgacactgctgaaggcactggtcagacagcagctgccggaaaagtacaaggaaatcttcttcgaccagagcaagaacggatacgcaggatacatcgacggaggagcaagccaggaagaattctacaagttcatcaagccgatcctggaaaagatggacggaacagaagaactgctggtcaagctgaacagagaagacctgctgagaaagcagagaacattcgacaacggaagcatcccgcaccagatccacctgggagaactgcacgcaatcctgagaagacaggaagacttctacccgttcctgaaggacaacagagaaaagatcgaaaagatcctgacattcagaatcccgtactacgtcggaccgctggcaagaggaaacagcagattcgcatggatgacaagaaagagcgaagaaacaatcacaccgtggaacttcgaagaagtcgtcgacaagggagcaagcgcacagagcttcatcgaaagaatgacaaacttcgacaagaacctgccgaacgaaaaggtcctgccgaagcacagcctgctgtacgaatacttcacagtctacaacgaactgacaaaggtcaagtacgtcacagaaggaatgagaaagccggcattcctgagcggagaacagaagaaggcaatcgtcgacctgctgttcaagacaaacagaaaggtcacagtcaagcagctgaaggaagactacttcaagaagatcgaatgcttcgacagcgtcgaaatcagcggagtcgaagacagattcaacgcaagcctgggaacataccacgacctgctgaagatcatcaaggacaaggacttcctggacaacgaagaaaacgaagacatcctggaagacatcgtcctgacactgacactgttcgaagacagagaaatgatcgaagaaagactgaagacatacgcacacctgttcgacgacaaggtcatgaagcagctgaagagaagaagatacacaggatggggaagactgagcagaaagctgatcaacggaatcagagacaagcagagcggaaagacaatcctggacttcctgaagagcgacggattcgcaaacagaaacttcatgcagctgatccacgacgacagcctgacattcaaggaagacatccagaaggcacaggtcagcggacagggagacagcctgcacgaacacatcgcaaacctggcaggaagcccggcaatcaagaagggaatcctgcagacagtcaaggtcgtcgacgaactggtcaaggtcatgggaagacacaagccggaaaacatcgtcatcgaaatggcaagagaaaaccagacaacacagaagggacagaagaacagcagagaaagaatgaagagaatcgaagaaggaatcaaggaactgggaagccagatcctgaaggaacacccggtcgaaaacacacagctgcagaacgaaaagctgtacctgtactacctgcagaacggaagagacatgtacgtcgaccaggaactggacatcaacagactgagcgactacgacgtcgaccacatcgtcccgcagagcttcctgaaggacgacagcatcgacaacaaggtcctgacaagaagcgacaagaacagaggaaagagcgacaacgtcccgagcgaagaagtcgtcaagaagatgaagaactactggagacagctgctgaacgcaaagctgatcacacagagaaagttcgacaacctgacaaaggcagagagaggaggactgagcgaactggacaaggcaggattcatcaagagacagctggtcgaaacaagacagatcacaaagcacgtcgcacagatcctggacagcagaatgaacacaaagtacgacgaaaacgacaagctgatcagagaagtcaaggtcatcacactgaagagcaagctggtcagcgacttcagaaaggacttccagttctacaaggtcagagaaatcaacaactaccaccacgcacacgacgcatacctgaacgcagtcgtcggaacagcactgatcaagaagtacccgaagctggaaagcgaattcgtctacggagactacaaggtctacgacgtcagaaagatgatcgcaaagagcgaacaggaaatcggaaaggcaacagcaaagtacttcttctacagcaacatcatgaacttcttcaagacagaaatcacactggcaaacggagaaatcagaaagagaccgctgatcgaaacaaacggagaaacaggagaaatcgtctgggacaagggaagagacttcgcaacagtcagaaaggtcctgagcatgccgcaggtcaacatcgtcaagaagacagaagtccagacaggaggattcagcaaggaaagcatcctgccgaagagaaacagcgacaagctgatcgcaagaaagaaggactgggacccgaagaagtacggaggattcgacagcccgacagtcgcatacagcgtcctggtcgtcgcaaaggtcgaaaagggaaagagcaagaagctgaagagcgtcaaggaactgctgggaatcacaatcatggaaagaagcagcttcgaaaagaacccgatcgacttcctggaagcaaagggatacaaggaagtcaagaaggacctgatcatcaagctgccgaagtacagcctgttcgaactggaaaacggaagaaagagaatgctggcaagcgcaggagaactgcagaagggaaacgaactggcactgccgagcaagtacgtcaacttcctgtacctggcaagccactacgaaaagctgaagggaagcccggaagacaacgaacagaagcagctgttcgtcgaacagcacaagcactacctggacgaaatcatcgaacagatcagcgaattcagcaagagagtcatcctggcagacgcaaacctggacaaggtcctgagcgcatacaacaagcacagagacaagccgatcagagaacaggcagaaaacatcatccacctgttcacactgacaaacctgggagcaccggcagcattcaagtacttcgacacaacaatcgacagaaagagatacacaagcacaaaggaagtcctggacgcaacactgatccaccagagcatcacaggactgtacgaaacaagaatcgacctgagccagctgggaggagacggaggaggaagcccgaagaagaagagaaaggtctagctagccatcacatttaaaagcatctcagcctaccatgagaataagagaaagaaaatgaagatcaatagcttattcatctctttttctttttcgttggtgtaaagccaacaccctgtctaaaaaacataaatttctttaatcattttgcctcttttctctgtgcttcaattaataaaaaatggaaagaacctcgag

SEQ ID NO: 3525 - DNA, 4140 bp, Artificial Sequence
  Synthetic
atggacaagaagtacagcatcggactggacatcggaacaaacagcgtcggatgggcagtcatcacagacgaatacaaggtcccgagcaagaagttcaaggtcctgggaaacacagacagacacagcatcaagaagaacctgatcggagcactgctgttcgacagcggagaaacagcagaagcaacaagactgaagagaacagcaagaagaagatacacaagaagaaagaacagaatctgctacctgcaggaaatcttcagcaacgaaatggcaaaggtcgacgacagcttcttccaccggctggaagaaagcttcctggtcgaagaagacaagaagcacgaaagacacccgatcttcggaaacatcgtcgacgaagtcgcataccacgaaaagtacccgacaatctaccacctgagaaagaagctggtcgacagcacagacaaggcagacctgagactgatctacctggcactggcacacatgatcaagttcagaggacacttcctgatcgaaggagacctgaacccggacaacagcgacgtcgacaagctgttcatccagctggtccagacatacaaccagctgttcgaagaaaacccgatcaacgcaagcggagtcgacgcaaaggcaatcctgagcgcaagactgagcaagagcagaagactggaaaacctgatcgcacagctgccgggagaaaagaagaacggactgttcggaaacctgatcgcactgagcctgggactgacaccgaacttcaagagcaacttcgacctggcagaagacgcaaagctgcagctgagcaaggacacatacgacgacgacctggacaacctgctggcacagatcggagaccagtacgcagacctgttcctggcagcaaagaacctgagcgacgcaatcctgctgagcgacatcctgagagtcaacacagaaatcacaaaggcaccgctgagcgcaagcatgatcaagagatacgacgaacaccaccaggacctgacactgctgaaggcactggtcagacagcagctgccggaaaagtacaaggaaatcttcttcgaccagagcaagaacggatacgcaggatacatcgacggaggagcaagccaggaagaattctacaagttcatcaagccgatcctggaaaagatggacggaacagaagaactgctggtcaagctgaacagagaagacctgctgagaaagcagagaacattcgacaacggaagcatcccgcaccagatccacctgggagaactgcacgcaatcctgagaagacaggaagacttctacccgttcctgaaggacaacagagaaaagatcgaaaagatcctgacattcagaatcccgtactacgtcggaccgctggcaagaggaaacagcagattcgcatggatgacaagaaagagcgaagaaacaatcacaccgtggaacttcgaagaagtcgtcgacaagggagcaagcgcacagagcttcatcgaaagaatgacaaacttcgacaagaacctgccgaacgaaaaggtcctgccgaagcacagcctgctgtacgaatacttcacagtctacaacgaactgacaaaggtcaagtacgtcacagaaggaatgagaaagccggcattcctgagcggagaacagaagaaggcaatcgtcgacctgctgttcaagacaaacagaaaggtcacagtcaagcagctgaaggaagactacttcaagaagatcgaatgcttcgacagcgtcgaaatcagcggagtcgaagacagattcaacgcaagcctgggaacataccacgacctgctgaagatcatcaaggacaaggacttcctggacaacgaagaaaacgaagacatcctggaagacatcgtcctgacactgacactgttcgaagacagagaaatgatcgaagaaagactgaagacatacgcacacctgttcgacgacaaggtcatgaagcagctgaagagaagaagatacacaggatggggaagactgagcagaaagctgatcaacggaatcagagacaagcagagcggaaagacaatcctggacttcctgaagagcgacggattcgcaaacagaaacttcatgcagctgatccacgacgacagcctgacattcaaggaagacatccagaaggcacaggtcagcggacagggagacagcctgcacgaacacatcgcaaacctggcaggaagcccggcaatcaagaagggaatcctgcagacagtcaaggtcgtcgacgaactggtcaaggtcatgggaagacacaagccggaaaacatcgtcatcgaaatggcaagagaaaaccagacaacacagaagggacagaagaacagcagagaaagaatgaagagaatcgaagaaggaatcaaggaactgggaagccagatcctgaaggaacacccggtcgaaaacacacagctgcagaacgaaaagctgtacctgtactacctgcaaaacggaagagacatgtacgtcgaccaggaactggacatcaacagactgagcgactacgacgtcgaccacatcgtcccgcagagcttcctgaaggacgacagcatcgacaacaaggtcctgacaagaagcgacaagaacagaggaaagagcgacaacgtcccgagcgaagaagtcgtcaagaagatgaagaactactggagacagctgctgaacgcaaagctgatcacacagagaaagttcgacaacctgacaaaggcagagagaggaggactgagcgaactggacaaggcaggattcatcaagagacagctggtcgaaacaagacagatcacaaagcacgtcgcacagatcctggacagcagaatgaacacaaagtacgacgaaaacgacaagctgatcagagaagtcaaggtcatcacactgaagagcaagctggtcagcgacttcagaaaggacttccagttctacaaggtcagagaaatcaacaactaccaccacgcacacgacgcatacctgaacgcagtcgtcggaacagcactgatcaagaagtacccgaagctggaaagcgaattcgtctacggagactacaaggtctacgacgtcagaaagatgatcgcaaagagcgaacaggaaatcggaaaggcaacagcaaagtacttcttctacagcaacatcatgaacttcttcaagacagaaatcacactggcaaacggagaaatcagaaagagaccgctgatcgaaacaaacggagaaacaggagaaatcgtctgggacaagggaagagacttcgcaacagtcagaaaggtcctgagcatgccgcaggtcaacatcgtcaagaagacagaagtccagacaggaggattcagcaaggaaagcatcctgccgaagagaaacagcgacaagctgatcgcaagaaagaaggactgggacccgaagaagtacggaggattcgacagcccgacagtcgcatacagcgtcctggtcgtcgcaaaggtcgaaaagggaaagagcaagaagctgaagagcgtcaaggaactgctgggaatcacaatcatggaaagaagcagcttcgaaaagaacccgatcgacttcctggaagcaaagggatacaaggaagtcaagaaggacctgatcatcaagctgccgaagtacagcctgttcgaactggaaaacggaagaaagagaatgctggcaagcgcaggagaactgcagaagggaaacgaactggcactgccgagcaagtacgtcaacttcctgtacctggcaagccactacgaaaagctgaagggaagcccggaagacaacgaacagaagcagctgttcgtcgaacagcacaagcactacctggacgaaatcatcgaacagatcagcgaattcagcaagagagtcatcctggcagacgcaaacctggacaaggtcctgagcgcatacaacaagcacagagacaagccgatcagagaacaggcagaaaacatcatccacctgttcacactgacaaacctgggagcaccggcagcattcaagtacttcgacacaacaatcgacagaaagagatacacaagcacaaaggaagtcctggacgcaacactgatccaccagagcatcacaggactgtacgaaacaagaatcgacctgagccagctgggaggagacggaggaggaagcccgaagaagaagagaaaggtctag

SEQ ID NO: 3526 - DNA, 4140 bp, Artificial Sequence
  Synthetic
atggacaagaagtacagcatcggcctggacatcggcaccaacagcgtgggctgggccgtgatcaccgacgagtacaaggtgcccagcaagaagttcaaggtgctgggcaacaccgacagacacagcatcaagaagaacctgatcggcgccctgctgttcgacagcggcgagaccgccgaggccaccagactgaagagaaccgccagaagaagatacaccagaagaaagaacagaatctgctacctgcaggagatcttcagcaacgagatggccaaggtggacgacagcttcttccacagactggaggagagcttcctggtggaggaggacaagaagcacgagagacaccccatcttcggcaacatcgtggacgaggtggcctaccacgagaagtaccccaccatctaccacctgagaaagaagctggtggacagcaccgacaaggccgacctgagactgatctacctggccctggcccacatgatcaagttcagaggccacttcctgatcgagggcgacctgaaccccgacaacagcgacgtggacaagctgttcatccagctggtgcagacctacaaccagctgttcgaggagaaccccatcaacgccagcggcgtggacgccaaggccatcctgagcgccagactgagcaagagcagaagactggagaacctgatcgcccagctgcccggcgagaagaagaacggcctgttcggcaacctgatcgccctgagcctgggcctgacccccaacttcaagagcaacttcgacctggccgaggacgccaagctgcagctgagcaaggacacctacgacgacgacctggacaacctgctggcccagatcggcgaccagtacgccgacctgttcctggccgccaagaacctgagcgacgccatcctgctgagcgacatcctgagagtgaacaccgagatcaccaaggcccccctgagcgccagcatgatcaagagatacgacgagcaccaccaggacctgaccctgctgaaggccctggtgagacagcagctgcccgagaagtacaaggagatcttcttcgaccagagcaagaacggctacgccggctacatcgacggcggcgccagccaggaggagttctacaagttcatcaagcccatcctggagaagatggacggcaccgaggagctgctggtgaagctgaacagagaggacctgctgagaaagcagagaaccttcgacaacggcagcatcccccaccagatccacctgggcgagctgcacgccatcctgagaagacaggaggacttctaccccttcctgaaggacaacagagagaagatcgagaagatcctgaccttcagaatcccctactacgtgggccccctggccagaggcaacagcagattcgcctggatgaccagaaagagcgaggagaccatcaccccctggaacttcgaggaggtggtggacaagggcgccagcgcccagagcttcatcgagagaatgaccaacttcgacaagaacctgcccaacgagaaggtgctgcccaagcacagcctgctgtacgagtacttcaccgtgtacaacgagctgaccaaggtgaagtacgtgaccgagggcatgagaaagcccgccttcctgagcggcgagcagaagaaggccatcgtggacctgctgttcaagaccaacagaaaggtgaccgtgaagcagctgaaggaggactacttcaagaagatcgagtgcttcgacagcgtggagatcagcggcgtggaggacagattcaacgccagcctgggcacctaccacgacctgctgaagatcatcaaggacaaggacttcctggacaacgaggagaacgaggacatcctggaggacatcgtgctgaccctgaccctgttcgaggacagagagatgatcgaggagagactgaagacctacgcccacctgttcgacgacaaggtgatgaagcagctgaagagaagaagatacaccggctggggcagactgagcagaaagctgatcaacggcatcagagacaagcagagcggcaagaccatcctggacttcctgaagagcgacggcttcgccaacagaaacttcatgcagctgatccacgacgacagcctgaccttcaaggaggacatccagaaggcccaggtgagcggccagggcgacagcctgcacgagcacatcgccaacctggccggcagccccgccatcaagaagggcatcctgcagaccgtgaaggtggtggacgagctggtgaaggtgatgggcagacacaagcccgagaacatcgtgatcgagatggccagagagaaccagaccacccagaagggccagaagaacagcagagagagaatgaagagaatcgaggagggcatcaaggagctgggcagccagatcctgaaggagcaccccgtggagaacacccagctgcagaacgagaagctgtacctgtactacctgcagaacggcagagacatgtacgtggaccaggagctggacatcaacagactgagcgactacgacgtggaccacatcgtgccccagagcttcctgaaggacgacagcatcgacaacaaggtgctgaccagaagcgacaagaacagaggcaagagcgacaacgtgcccagcgaggaggtggtgaagaagatgaagaactactggagacagctgctgaacgccaagctgatcacccagagaaagttcgacaacctgaccaaggccgagagaggcggcctgagcgagctggacaaggccggcttcatcaagagacagctggtggagaccagacagatcaccaagcacgtggcccagatcctggacagcagaatgaacaccaagtacgacgagaacgacaagctgatcagagaggtgaaggtgatcaccctgaagagcaagctggtgagcgacttcagaaaggacttccagttctacaaggtgagagagatcaacaactaccaccacgcccacgacgcctacctgaacgccgtggtgggcaccgccctgatcaagaagtaccccaagctggagagcgagttcgtgtacggcgactacaaggtgtacgacgtgagaaagatgatcgccaagagcgagcaggagatcggcaaggccaccgccaagtacttcttctacagcaacatcatgaacttcttcaagaccgagatcaccctggccaacggcgagatcagaaagagacccctgatcgagaccaacggcgagaccggcgagatcgtgtgggacaagggcagagacttcgccaccgtgagaaaggtgctgagcatgccccaggtgaacatcgtgaagaagaccgaggtgcagaccggcggcttcagcaaggagagcatcctgcccaagagaaacagcgacaagctgatcgccagaaagaaggactgggaccccaagaagtacggcggcttcgacagccccaccgtggcctacagcgtgctggtggtggccaaggtggagaagggcaagagcaagaagctgaagagcgtgaaggagctgctgggcatcaccatcatggagagaagcagcttcgagaagaaccccatcgacttcctggaggccaagggctacaaggaggtgaagaaggacctgatcatcaagctgcccaagtacagcctgttcgagctggagaacggcagaaagagaatgctggccagcgccggcgagctgcagaagggcaacgagctggccctgcccagcaagtacgtgaacttcctgtacctggccagccactacgagaagctgaagggcagccccgaggacaacgagcagaagcagctgttcgtggagcagcacaagcactacctggacgagatcatcgagcagatcagcgagttcagcaagagagtgatcctggccgacgccaacctggacaaggtgctgagcgcctacaacaagcacagagacaagcccatcagagagcaggccgagaacatcatccacctgttcaccctgaccaacctgggcgcccccgccgccttcaagtacttcgacaccaccatcgacagaaagagatacaccagcaccaaggaggtgctggacgccaccctgatccaccagagcatcaccggcctgtacgagaccagaatcgacctgagccagctgggcggcgacggcggcggcagccccaagaagaagagaaaggtgtga

SEQ ID NO: 3527 - DNA, 4411 bp, Artificial Sequence
  Synthetic
gggtcccgcagtcggcgtccagcggctctgcttgttcgtgtgtgtgtcgttgcaggccttattcggatccgccaccatggacaagaagtacagcatcggcctggacatcggcaccaacagcgtgggctgggccgtgatcaccgacgagtacaaggtgcccagcaagaagttcaaggtgctgggcaacaccgacagacacagcatcaagaagaacctgatcggcgccctgctgttcgacagcggcgagaccgccgaggccaccagactgaagagaaccgccagaagaagatacaccagaagaaagaacagaatctgctacctgcaggagatcttcagcaacgagatggccaaggtggacgacagcttcttccacagactggaggagagcttcctggtggaggaggacaagaagcacgagagacaccccatcttcggcaacatcgtggacgaggtggcctaccacgagaagtaccccaccatctaccacctgagaaagaagctggtggacagcaccgacaaggccgacctgagactgatctacctggccctggcccacatgatcaagttcagaggccacttcctgatcgagggcgacctgaaccccgacaacagcgacgtggacaagctgttcatccagctggtgcagacctacaaccagctgttcgaggagaaccccatcaacgccagcggcgtggacgccaaggccatcctgagcgccagactgagcaagagcagaagactggagaacctgatcgcccagctgcccggcgagaagaagaacggcctgttcggcaacctgatcgccctgagcctgggcctgacccccaacttcaagagcaacttcgacctggccgaggacgccaagctgcagctgagcaaggacacctacgacgacgacctggacaacctgctggcccagatcggcgaccagtacgccgacctgttcctggccgccaagaacctgagcgacgccatcctgctgagcgacatcctgagagtgaacaccgagatcaccaaggcccccctgagcgccagcatgatcaagagatacgacgagcaccaccaggacctgaccctgctgaaggccctggtgagacagcagctgcccgagaagtacaaggagatcttcttcgaccagagcaagaacggctacgccggctacatcgacggcggcgccagccaggaggagttctacaagttcatcaagcccatcctggagaagatggacggcaccgaggagctgctggtgaagctgaacagagaggacctgctgagaaagcagagaaccttcgacaacggcagcatcccccaccagatccacctgggcgagctgcacgccatcctgagaagacaggaggacttctaccccttcctgaaggacaacagagagaagatcgagaagatcctgaccttcagaatcccctactacgtgggccccctggccagaggcaacagcagattcgcctggatgaccagaaagagcgaggagaccatcaccccctggaacttcgaggaggtggtggacaagggcgccagcgcccagagcttcatcgagagaatgaccaacttcgacaagaacctgcccaacgagaaggtgctgcccaagcacagcctgctgtacgagtacttcaccgtgtacaacgagctgaccaaggtgaagtacgtgaccgagggcatgagaaagcccgccttcctgagcggcgagcagaagaaggccatcgtggacctgctgttcaagaccaacagaaaggtgaccgtgaagcagctgaaggaggactacttcaagaagatcgagtgcttcgacagcgtggagatcagcggcgtggaggacagattcaacgccagcctgggcacctaccacgacctgctgaagatcatcaaggacaaggacttcctggacaacgaggagaacgaggacatcctggaggacatcgtgctgaccctgaccctgttcgaggacagagagatgatcgaggagagactgaagacctacgcccacctgttcgacgacaaggtgatgaagcagctgaagagaagaagatacaccggctggggcagactgagcagaaagctgatcaacggcatcagagacaagcagagcggcaagaccatcctggacttcctgaagagcgacggcttcgccaacagaaacttcatgcagctgatccacgacgacagcctgaccttcaaggaggacatccagaaggcccaggtgagcggccagggcgacagcctgcacgagcacatcgccaacctggccggcagccccgccatcaagaagggcatcctgcagaccgtgaaggtggtggacgagctggtgaaggtgatgggcagacacaagcccgagaacatcgtgatcgagatggccagagagaaccagaccacccagaagggccagaagaacagcagagagagaatgaagagaatcgaggagggcatcaaggagctgggcagccagatcctgaaggagcaccccgtggagaacacccagctgcagaacgagaagctgtacctgtactacctgcagaacggcagagacatgtacgtggaccaggagctggacatcaacagactgagcgactacgacgtggaccacatcgtgccccagagcttcctgaaggacgacagcatcgacaacaaggtgctgaccagaagcgacaagaacagaggcaagagcgacaacgtgcccagcgaggaggtggtgaagaagatgaagaactactggagacagctgctgaacgccaagctgatcacccagagaaagttcgacaacctgaccaaggccgagagaggcggcctgagcgagctggacaaggccggcttcatcaagagacagctggtggagaccagacagatcaccaagcacgtggcccagatcctggacagcagaatgaacaccaagtacgacgagaacgacaagctgatcagagaggtgaaggtgatcaccctgaagagcaagctggtgagcgacttcagaaaggacttccagttctacaaggtgagagagatcaacaactaccaccacgcccacgacgcctacctgaacgccgtggtgggcaccgccctgatcaagaagtaccccaagctggagagcgagttcgtgtacggcgactacaaggtgtacgacgtgagaaagatgatcgccaagagcgagcaggagatcggcaaggccaccgccaagtacttcttctacagcaacatcatgaacttcttcaagaccgagatcaccctggccaacggcgagatcagaaagagacccctgatcgagaccaacggcgagaccggcgagatcgtgtgggacaagggcagagacttcgccaccgtgagaaaggtgctgagcatgccccaggtgaacatcgtgaagaagaccgaggtgcagaccggcggcttcagcaaggagagcatcctgcccaagagaaacagcgacaagctgatcgccagaaagaaggactgggaccccaagaagtacggcggcttcgacagccccaccgtggcctacagcgtgctggtggtggccaaggtggagaagggcaagagcaagaagctgaagagcgtgaaggagctgctgggcatcaccatcatggagagaagcagcttcgagaagaaccccatcgacttcctggaggccaagggctacaaggaggtgaagaaggacctgatcatcaagctgcccaagtacagcctgttcgagctggagaacggcagaaagagaatgctggccagcgccggcgagctgcagaagggcaacgagctggccctgcccagcaagtacgtgaacttcctgtacctggccagccactacgagaagctgaagggcagccccgaggacaacgagcagaagcagctgttcgtggagcagcacaagcactacctggacgagatcatcgagcagatcagcgagttcagcaagagagtgatcctggccgacgccaacctggacaaggtgctgagcgcctacaacaagcacagagacaagcccatcagagagcaggccgagaacatcatccacctgttcaccctgaccaacctgggcgcccccgccgccttcaagtacttcgacaccaccatcgacagaaagagatacaccagcaccaaggaggtgctggacgccaccctgatccaccagagcatcaccggcctgtacgagaccagaatcgacctgagccagctgggcggcgacggcggcggcagccccaagaagaagagaaaggtgtgactagccatcacatttaaaagcatctcagcctaccatgagaataagagaaagaaaatgaagatcaatagcttattcatctctttttctttttcgttggtgtaaagccaacaccctgtctaaaaaacataaatttctttaatcattttgcctcttttctctgtgcttcaattaataaaaaatggaaagaacctcgag

SEQ ID NO: 3528 - DNA, 4411 bp, Artificial Sequence
  Synthetic
gggtcccgcagtcggcgtccagcggctctgcttgttcgtgtgtgtgtcgttgcaggccttattcggatccgccaccatggacaaaaaatacagcatagggctagacatagggacgaacagcgtagggtgggcggtaataacggacgaatacaaagtaccgagcaaaaaattcaaagtactagggaacacggaccgacacagcataaaaaaaaacctaataggggcgctactattcgacagcggggaaacggcggaagcgacgcgactaaaacgaacggcgcgacgacgatacacgcgacgaaaaaaccgaatatgctacctacaagaaatattcagcaacgaaatggcgaaagtagacgacagcttcttccaccgactagaagaaagcttcctagtagaagaagacaaaaaacacgaacgacacccgatattcgggaacatagtagacgaagtagcgtaccacgaaaaatacccgacgatataccacctacgaaaaaaactagtagacagcacggacaaagcggacctacgactaatatacctagcgctagcgcacatgataaaattccgagggcacttcctaatagaaggggacctaaacccggacaacagcgacgtagacaaactattcatacaactagtacaaacgtacaaccaactattcgaagaaaacccgataaacgcgagcggggtagacgcgaaagcgatactaagcgcgcgactaagcaaaagccgacgactagaaaacctaatagcgcaactaccgggggaaaaaaaaaacgggctattcgggaacctaatagcgctaagcctagggctaacgccgaacttcaaaagcaacttcgacctagcggaagacgcgaaactacaactaagcaaagacacgtacgacgacgacctagacaacctactagcgcaaataggggaccaatacgcggacctattcctagcggcgaaaaacctaagcgacgcgatactactaagcgacatactacgagtaaacacggaaataacgaaagcgccgctaagcgcgagcatgataaaacgatacgacgaacaccaccaagacctaacgctactaaaagcgctagtacgacaacaactaccggaaaaatacaaagaaatattcttcgaccaaagcaaaaacgggtacgcggggtacatagacgggggggcgagccaagaagaattctacaaattcataaaaccgatactagaaaaaatggacgggacggaagaactactagtaaaactaaaccgagaagacctactacgaaaacaacgaacgttcgacaacgggagcataccgcaccaaatacacctaggggaactacacgcgatactacgacgacaagaagacttctacccgttcctaaaagacaaccgagaaaaaatagaaaaaatactaacgttccgaataccgtactacgtagggccgctagcgcgagggaacagccgattcgcgtggatgacgcgaaaaagcgaagaaacgataacgccgtggaacttcgaagaagtagtagacaaaggggcgagcgcgcaaagcttcatagaacgaatgacgaacttcgacaaaaacctaccgaacgaaaaagtactaccgaaacacagcctactatacgaatacttcacggtatacaacgaactaacgaaagtaaaatacgtaacggaagggatgcgaaaaccggcgttcctaagcggggaacaaaaaaaagcgatagtagacctactattcaaaacgaaccgaaaagtaacggtaaaacaactaaaagaagactacttcaaaaaaatagaatgcttcgacagcgtagaaataagcggggtagaagaccgattcaacgcgagcctagggacgtaccacgacctactaaaaataataaaagacaaagacttcctagacaacgaagaaaacgaagacatactagaagacatagtactaacgctaacgctattcgaagaccgagaaatgatagaagaacgactaaaaacgtacgcgcacctattcgacgacaaagtaatgaaacaactaaaacgacgacgatacacggggtgggggcgactaagccgaaaactaataaacgggatacgagacaaacaaagcgggaaaacgatactagacttcctaaaaagcgacgggttcgcgaaccgaaacttcatgcaactaatacacgacgacagcctaacgttcaaagaagacatacaaaaagcgcaagtaagcgggcaaggggacagcctacacgaacacatagcgaacctagcggggagcccggcgataaaaaaagggatactacaaacggtaaaagtagtagacgaactagtaaaagtaatggggcgacacaaaccggaaaacatagtaatagaaatggcgcgagaaaaccaaacgacgcaaaaagggcaaaaaaacagccgagaacgaatgaaacgaatagaagaagggataaaagaactagggagccaaatactaaaagaacacccggtagaaaacacgcaactacaaaacgaaaaactatacctatactacctacaaaacgggcgagacatgtacgtagaccaagaactagacataaaccgactaagcgactacgacgtagaccacatagtaccgcaaagcttcctaaaagacgacagcatagacaacaaagtactaacgcgaagcgacaaaaaccgagggaaaagcgacaacgtaccgagcgaagaagtagtaaaaaaaatgaaaaactactggcgacaactactaaacgcgaaactaataacgcaacgaaaattcgacaacctaacgaaagcggaacgaggggggctaagcgaactagacaaagcggggttcataaaacgacaactagtagaaacgcgacaaataacgaaacacgtagcgcaaatactagacagccgaatgaacacgaaatacgacgaaaacgacaaactaatacgagaagtaaaagtaataacgctaaaaagcaaactagtaagcgacttccgaaaagacttccaattctacaaagtacgagaaataaacaactaccaccacgcgcacgacgcgtacctaaacgcggtagtagggacggcgctaataaaaaaatacccgaaactagaaagcgaattcgtatacggggactacaaagtatacgacgtacgaaaaatgatagcgaaaagcgaacaagaaatagggaaagcgacggcgaaatacttcttctacagcaacataatgaacttcttcaaaacggaaataacgctagcgaacggggaaatacgaaaacgaccgctaatagaaacgaacggggaaacgggggaaatagtatgggacaaagggcgagacttcgcgacggtacgaaaagtactaagcatgccgcaagtaaacatagtaaaaaaaacggaagtacaaacgggggggttcagcaaagaaagcatactaccgaaacgaaacagcgacaaactaatagcgcgaaaaaaagactgggacccgaaaaaatacggggggttcgacagcccgacggtagcgtacagcgtactagtagtagcgaaagtagaaaaagggaaaagcaaaaaactaaaaagcgtaaaagaactactagggataacgataatggaacgaagcagcttcgaaaaaaacccgatagacttcctagaagcgaaagggtacaaagaagtaaaaaaagacctaataataaaactaccgaaatacagcctattcgaactagaaaacgggcgaaaacgaatgctagcgagcgcgggggaactacaaaaagggaacgaactagcgctaccgagcaaatacgtaaacttcctatacctagcgagccactacgaaaaactaaaagggagcccggaagacaacgaacaaaaacaactattcgtagaacaacacaaacactacctagacgaaataatagaacaaataagcgaattcagcaaacgagtaatactagcggacgcgaacctagacaaagtactaagcgcgtacaacaaacaccgagacaaaccgatacgagaacaagcggaaaacataatacacctattcacgctaacgaacctaggggcgccggcggcgttcaaatacttcgacacgacgatagaccgaaaacgatacacgagcacgaaagaagtactagacgcgacgctaatacaccaaagcataacggggctatacgaaacgcgaatagacctaagccaactagggggggacgggggggggagcccgaaaaaaaaacgaaaagtatgactagccatcacatttaaaagcatctcagcctaccatgagaataagagaaagaaaatgaagatcaatagcttattcatctctttttctttttcgttggtgtaaagccaacaccctgtctaaaaaacataaatttctttaatcattttgcctcttttctctgtgcttcaattaataaaaaatggaaagaacctcgag

SEQ ID NO: 3529 - DNA, 4140 bp, Artificial Sequence
  Synthetic
atggacaagaagtactctatcggtttggacatcggtaccaactctgtcggttgggccgtcatcaccgacgaatacaaggtcccatctaagaagttcaaggtcttgggtaacaccgacagacactctatcaagaagaacttgatcggtgccttgttgttcgactctggtgaaaccgccgaagccaccagattgaagagaaccgccagaagaagatacaccagaagaaagaacagaatctgctacttgcaagaaatcttctctaacgaaatggccaaggtcgacgactctttcttccacagattggaagaatctttcttggtcgaagaagacaagaagcacgaaagacacccaatcttcggtaacatcgtcgacgaagtcgcctaccacgaaaagtacccaaccatctaccacttgagaaagaagttggtcgactctaccgacaaggccgacttgagattgatctacttggccttggcccacatgatcaagttcagaggtcacttcttgatcgaaggtgacttgaacccagacaactctgacgtcgacaagttgttcatccaattggtccaaacctacaaccaattgttcgaagaaaacccaatcaacgcctctggtgtcgacgccaaggccatcttgtctgccagattgtctaagagcagaagattggaaaacttgatcgcccaattgccaggtgaaaagaagaacggtttgttcggtaacttgatcgccttgtctttgggtttgaccccaaacttcaagtctaacttcgacttggccgaagacgccaagttgcaattgtctaaggacacctacgacgacgacttggacaacttgttggcccaaatcggtgaccaatacgccgacttgttcttggccgccaagaacttgtctgacgccatcttgttgtctgacatcttgagagtcaacaccgaaatcaccaaggccccattgtctgcctctatgatcaagagatacgacgaacaccaccaagacttgaccttgttgaaggccttggtcagacaacaattgccagaaaagtacaaggaaatcttcttcgaccaatctaagaacggttacgccggttacatcgacggtggtgcctctcaagaagaattctacaagttcatcaagccaatcttggaaaagatggacggtaccgaagaattgttggtcaagttgaacagagaagacttgttgagaaagcaaagaaccttcgacaacggttctatcccacaccaaatccacttgggtgaattgcacgccatcttgagaagacaagaagacttctacccattcttgaaggacaacagagaaaagatcgaaaagatcttgaccttcagaatcccatactacgtcggtccattggccagaggtaacagcagattcgcctggatgaccagaaagtctgaagaaaccatcaccccatggaacttcgaagaagtcgtcgacaagggtgcctctgcccaatctttcatcgaaagaatgaccaacttcgacaagaacttgccaaacgaaaaggtcttgccaaagcactctttgttgtacgaatacttcaccgtctacaacgaattgaccaaggtcaagtacgtcaccgaaggtatgagaaagccagccttcttgtctggtgaacaaaagaaggccatcgtcgacttgttgttcaagaccaacagaaaggtcaccgtcaagcaattgaaggaagactacttcaagaagatcgaatgcttcgactctgtcgaaatctctggtgtcgaagacagattcaacgcctctttgggtacctaccacgacttgttgaagatcatcaaggacaaggacttcttggacaacgaagaaaacgaagacatcttggaagacatcgtcttgaccttgaccttgttcgaagacagagaaatgatcgaagaaagattgaagacctacgcccacttgttcgacgacaaggtcatgaagcaattgaagagaagaagatacaccggttggggtagattgagcagaaagttgatcaacggtatcagagacaagcaatctggtaagaccatcttggacttcttgaagtctgacggtttcgccaacagaaacttcatgcaattgatccacgacgactctttgaccttcaaggaagacatccaaaaggcccaagtctctggtcaaggtgactctttgcacgaacacatcgccaacttggccggttctccagccatcaagaagggtatcttgcaaaccgtcaaggtcgtcgacgaattggtcaaggtcatgggtagacacaagccagaaaacatcgtcatcgaaatggccagagaaaaccaaaccacccaaaagggtcaaaagaacagcagagaaagaatgaagagaatcgaagaaggtatcaaggaattgggttctcaaatcttgaaggaacacccagtcgaaaacacccaattgcaaaacgaaaagttgtacttgtactacttgcaaaacggtagagacatgtacgtcgaccaagaattggacatcaacagattgtctgactacgacgtcgaccacatcgtcccacaatctttcttgaaggacgactctatcgacaacaaggtcttgaccagatctgacaagaacagaggtaagtctgacaacgtcccatctgaagaagtcgtcaagaagatgaagaactactggagacaattgttgaacgccaagttgatcacccaaagaaagttcgacaacttgaccaaggccgaaagaggtggtttgtctgaattggacaaggccggtttcatcaagagacaattggtcgaaaccagacaaatcaccaagcacgtcgcccaaatcttggacagcagaatgaacaccaagtacgacgaaaacgacaagttgatcagagaagtcaaggtcatcaccttgaagtctaagttggtctctgacttcagaaaggacttccaattctacaaggtcagagaaatcaacaactaccaccacgcccacgacgcctacttgaacgccgtcgtcggtaccgccttgatcaagaagtacccaaagttggaatctgaattcgtctacggtgactacaaggtctacgacgtcagaaagatgatcgccaagtctgaacaagaaatcggtaaggccaccgccaagtacttcttctactctaacatcatgaacttcttcaagaccgaaatcaccttggccaacggtgaaatcagaaagagaccattgatcgaaaccaacggtgaaaccggtgaaatcgtctgggacaagggtagagacttcgccaccgtcagaaaggtcttgtctatgccacaagtcaacatcgtcaagaagaccgaagtccaaaccggtggtttctctaaggaatctatcttgccaaagagaaactctgacaagttgatcgccagaaagaaggactgggacccaaagaagtacggtggtttcgactctccaaccgtcgcctactctgtcttggtcgtcgccaaggtcgaaaagggtaagtctaagaagttgaagtctgtcaaggaattgttgggtatcaccatcatggaaagatcttctttcgaaaagaacccaatcgacttcttggaagccaagggttacaaggaagtcaagaaggacttgatcatcaagttgccaaagtactctttgttcgaattggaaaacggtagaaagagaatgttggcctctgccggtgaattgcaaaagggtaacgaattggccttgccatctaagtacgtcaacttcttgtacttggcctctcactacgaaaagttgaagggttctccagaagacaacgaacaaaagcaattgttcgtcgaacaacacaagcactacttggacgaaatcatcgaacaaatctctgaattctctaagagagtcatcttggccgacgccaacttggacaaggtcttgtctgcctacaacaagcacagagacaagccaatcagagaacaagccgaaaacatcatccacttgttcaccttgaccaacttgggtgccccagccgccttcaagtacttcgacaccaccatcgacagaaagagatacacctctaccaaggaagtcttggacgccaccttgatccaccaatctatcaccggtttgtacgaaaccagaatcgacttgtctcaattgggtggtgacggtggtggttctccaaagaagaagagaaaggtctaa

SEQ ID NO: 3530 - DNA, 4140 bp, Artificial Sequence
  Synthetic
atggacaagaagtactccatcggcctggacatcggcaccaactccgtgggctgggccgtgatcaccgacgagtacaaggtgccctccaagaagttcaaggtgctgggcaacaccgaccggcactccatcaagaagaacctgatcggcgccctgctgttcgactccggcgagaccgccgaggccacccggctgaagcggaccgcccggcggcggtacacccggcggaagaaccggatctgctacctgcaggagatcttctccaacgagatggccaaggtggacgactccttcttccaccggctggaggagtccttcctggtggaggaggacaagaagcacgagcggcaccccatcttcggcaacatcgtggacgaggtggcctaccacgagaagtaccccaccatctaccacctgcggaagaagctggtggactccaccgacaaggccgacctgcggctgatctacctggccctggcccacatgatcaagttccggggccacttcctgatcgagggcgacctgaaccccgacaactccgacgtggacaagctgttcatccagctggtgcagacctacaaccagctgttcgaggagaaccccatcaacgcctccggcgtggacgccaaggccatcctgtccgcccggctgtccaagtcccggcggctggagaacctgatcgcccagctgcccggcgagaagaagaacggcctgttcggcaacctgatcgccctgtccctgggcctgacccccaacttcaagtccaacttcgacctggccgaggacgccaagctgcagctgtccaaggacacctacgacgacgacctggacaacctgctggcccagatcggcgaccagtacgccgacctgttcctggccgccaagaacctgtccgacgccatcctgctgtccgacatcctgcgggtgaacaccgagatcaccaaggcccccctgtccgcctccatgatcaagcggtacgacgagcaccaccaggacctgaccctgctgaaggccctggtgcggcagcagctgcccgagaagtacaaggagatcttcttcgaccagtccaagaacggctacgccggctacatcgacggcggcgcctcccaggaggagttctacaagttcatcaagcccatcctggagaagatggacggcaccgaggagctgctggtgaagctgaaccgggaggacctgctgcggaagcagcggaccttcgacaacggctccatcccccaccagatccacctgggcgagctgcacgccatcctgcggcggcaggaggacttctaccccttcctgaaggacaaccgggagaagatcgagaagatcctgaccttccggatcccctactacgtgggccccctggcccggggcaactcccggttcgcctggatgacccggaagtccgaggagaccatcaccccctggaacttcgaggaggtggtggacaagggcgcctccgcccagtccttcatcgagcggatgaccaacttcgacaagaacctgcccaacgagaaggtgctgcccaagcactccctgctgtacgagtacttcaccgtgtacaacgagctgaccaaggtgaagtacgtgaccgagggcatgcggaagcccgccttcctgtccggcgagcagaagaaggccatcgtggacctgctgttcaagaccaaccggaaggtgaccgtgaagcagctgaaggaggactacttcaagaagatcgagtgcttcgactccgtggagatctccggcgtggaggaccggttcaacgcctccctgggcacctaccacgacctgctgaagatcatcaaggacaaggacttcctggacaacgaggagaacgaggacatcctggaggacatcgtgctgaccctgaccctgttcgaggaccgggagatgatcgaggagcggctgaagacctacgcccacctgttcgacgacaaggtgatgaagcagctgaagcggcggcggtacaccggctggggccggctgtcccggaagctgatcaacggcatccgggacaagcagtccggcaagaccatcctggacttcctgaagtccgacggcttcgccaaccggaacttcatgcagctgatccacgacgactccctgaccttcaaggaggacatccagaaggcccaggtgtccggccagggcgactccctgcacgagcacatcgccaacctggccggctcccccgccatcaagaagggcatcctgcagaccgtgaaggtggtggacgagctggtgaaggtgatgggccggcacaagcccgagaacatcgtgatcgagatggcccgggagaaccagaccacccagaagggccagaagaactcccgggagcggatgaagcggatcgaggagggcatcaaggagctgggctcccagatcctgaaggagcaccccgtggagaacacccagctgcagaacgagaagctgtacctgtactacctgcagaacggccgggacatgtacgtggaccaggagctggacatcaaccggctgtccgactacgacgtggaccacatcgtgccccagtccttcctgaaggacgactccatcgacaacaaggtgctgacccggtccgacaagaaccggggcaagtccgacaacgtgccctccgaggaggtggtgaagaagatgaagaactactggcggcagctgctgaacgccaagctgatcacccagcggaagttcgacaacctgaccaaggccgagcggggcggcctgtccgagctggacaaggccggcttcatcaagcggcagctggtggagacccggcagatcaccaagcacgtggcccagatcctggactcccggatgaacaccaagtacgacgagaacgacaagctgatccgggaggtgaaggtgatcaccctgaagtccaagctggtgtccgacttccggaaggacttccagttctacaaggtgcgggagatcaacaactaccaccacgcccacgacgcctacctgaacgccgtggtgggcaccgccctgatcaagaagtaccccaagctggagtccgagttcgtgtacggcgactacaaggtgtacgacgtgcggaagatgatcgccaagtccgagcaggagatcggcaaggccaccgccaagtacttcttctactccaacatcatgaacttcttcaagaccgagatcaccctggccaacggcgagatccggaagcggcccctgatcgagaccaacggcgagaccggcgagatcgtgtgggacaagggccgggacttcgccaccgtgcggaaggtgctgtccatgccccaggtgaacatcgtgaagaagaccgaggtgcagaccggcggcttctccaaggagtccatcctgcccaagcggaactccgacaagctgatcgcccggaagaaggactgggaccccaagaagtacggcggcttcgactcccccaccgtggcctactccgtgctggtggtggccaaggtggagaagggcaagtccaagaagctgaagtccgtgaaggagctgctgggcatcaccatcatggagcggtcctccttcgagaagaaccccatcgacttcctggaggccaagggctacaaggaggtgaagaaggacctgatcatcaagctgcccaagtactccctgttcgagctggagaacggccggaagcggatgctggcctccgccggcgagctgcagaagggcaacgagctggccctgccctccaagtacgtgaacttcctgtacctggcctcccactacgagaagctgaagggctcccccgaggacaacgagcagaagcagctgttcgtggagcagcacaagcactacctggacgagatcatcgagcagatctccgagttctccaagcgggtgatcctggccgacgccaacctggacaaggtgctgtccgcctacaacaagcaccgggacaagcccatccgggagcaggccgagaacatcatccacctgttcaccctgaccaacctgggcgcccccgccgccttcaagtacttcgacaccaccatcgaccggaagcggtacacctccaccaaggaggtgctggacgccaccctgatccaccagtccatcaccggcctgtacgagacccggatcgacctgtcccagctgggcggcgacggcggcggctcccccaagaagaagcggaaggtgtga

SEQ ID NO: 3531 - DNA, 4140 bp, Artificial Sequence
  Synthetic
atggacaagaagtacagcatcggcctggacatcggcaccaacagcgtgggctgggccgtgatcaccgacgagtacaaggtgcccagcaagaagttcaaggtgctgggcaacaccgaccggcacagcatcaagaagaacctgatcggcgccctgctgttcgacagcggcgagaccgccgaggccacccggctgaagcggaccgcccggcggcggtacacccggcggaagaaccggatctgctacctgcaggagatcttcagcaacgagatggccaaggtggacgacagcttcttccaccggctggaggagagcttcctggtggaggaggacaagaagcacgagcggcaccccatcttcggcaacatcgtggacgaggtggcctaccacgagaagtaccccaccatctaccacctgcggaagaagctggtggacagcaccgacaaggccgacctgcggctgatctacctggccctggcccacatgatcaagttccggggccacttcctgatcgagggcgacctgaaccccgacaacagcgacgtggacaagctgttcatccagctggtgcagacctacaaccagctgttcgaggagaaccccatcaacgccagcggcgtggacgccaaggccatcctgagcgcccggctgagcaagagccggcggctggagaacctgatcgcccagctgcccggcgagaagaagaacggcctgttcggcaacctgatcgccctgagcctgggcctgacccccaacttcaagagcaacttcgacctggccgaggacgccaagctgcagctgagcaaggacacctacgacgacgacctggacaacctgctggcccagatcggcgaccagtacgccgacctgttcctggccgccaagaacctgagcgacgccatcctgctgagcgacatcctgcgggtgaacaccgagatcaccaaggcccccctgagcgccagcatgatcaagcggtacgacgagcaccaccaggacctgaccctgctgaaggccctggtgcggcagcagctgcccgagaagtacaaggagatcttcttcgaccagagcaagaacggctacgccggctacatcgacggcggcgccagccaggaggagttctacaagttcatcaagcccatcctggagaagatggacggcaccgaggagctgctggtgaagctgaaccgggaggacctgctgcggaagcagcggaccttcgacaacggcagcatcccccaccagatccacctgggcgagctgcacgccatcctgcggcggcaggaggacttctaccccttcctgaaggacaaccgggagaagatcgagaagatcctgaccttccggatcccctactacgtgggccccctggcccggggcaacagccggttcgcctggatgacccggaagagcgaggagaccatcaccccctggaacttcgaggaggtggtggacaagggcgccagcgcccagagcttcatcgagcggatgaccaacttcgacaagaacctgcccaacgagaaggtgctgcccaagcacagcctgctgtacgagtacttcaccgtgtacaacgagctgaccaaggtgaagtacgtgaccgagggcatgcggaagcccgccttcctgagcggcgagcagaagaaggccatcgtggacctgctgttcaagaccaaccggaaggtgaccgtgaagcagctgaaggaggactacttcaagaagatcgagtgcttcgacagcgtggagatcagcggcgtggaggaccggttcaacgccagcctgggcacctaccacgacctgctgaagatcatcaaggacaaggacttcctggacaacgaggagaacgaggacatcctggaggacatcgtgctgaccctgaccctgttcgaggaccgggagatgatcgaggagcggctgaagacctacgcccacctgttcgacgacaaggtgatgaagcagctgaagcggcggcggtacaccggctggggccggctgagccggaagctgatcaacggcatccgggacaagcagagcggcaagaccatcctggacttcctgaagagcgacggcttcgccaaccggaacttcatgcagctgatccacgacgacagcctgaccttcaaggaggacatccagaaggcccaggtgagcggccagggcgacagcctgcacgagcacatcgccaacctggccggcagccccgccatcaagaagggcatcctgcagaccgtgaaggtggtggacgagctggtgaaggtgatgggccggcacaagcccgagaacatcgtgatcgagatggcccgggagaaccagaccacccagaagggccagaagaacagccgggagcggatgaagcggatcgaggagggcatcaaggagctgggcagccagatcctgaaggagcaccccgtggagaacacccagctgcagaacgagaagctgtacctgtactacctgcagaacggccgggacatgtacgtggaccaggagctggacatcaaccggctgagcgactacgacgtggaccacatcgtgccccagagcttcctgaaggacgacagcatcgacaacaaggtgctgacccggagcgacaagaaccggggcaagagcgacaacgtgcccagcgaggaggtggtgaagaagatgaagaactactggcggcagctgctgaacgccaagctgatcacccagcggaagttcgacaacctgaccaaggccgagcggggcggcctgagcgagctggacaaggccggcttcatcaagcggcagctggtggagacccggcagatcaccaagcacgtggcccagatcctggacagccggatgaacaccaagtacgacgagaacgacaagctgatccgggaggtgaaggtgatcaccctgaagagcaagctggtgagcgacttccggaaggacttccagttctacaaggtgcgggagatcaacaactaccaccacgcccacgacgcctacctgaacgccgtggtgggcaccgccctgatcaagaagtaccccaagctggagagcgagttcgtgtacggcgactacaaggtgtacgacgtgcggaagatgatcgccaagagcgagcaggagatcggcaaggccaccgccaagtacttcttctacagcaacatcatgaacttcttcaagaccgagatcaccctggccaacggcgagatccggaagcggcccctgatcgagaccaacggcgagaccggcgagatcgtgtgggacaagggccgggacttcgccaccgtgcggaaggtgctgagcatgccccaggtgaacatcgtgaagaagaccgaggtgcagaccggcggcttcagcaaggagagcatcctgcccaagcggaacagcgacaagctgatcgcccggaagaaggactgggaccccaagaagtacggcggcttcgacagccccaccgtggcctacagcgtgctggtggtggccaaggtggagaagggcaagagcaagaagctgaagagcgtgaaggagctgctgggcatcaccatcatggagcggagcagcttcgagaagaaccccatcgacttcctggaggccaagggctacaaggaggtgaagaaggacctgatcatcaagctgcccaagtacagcctgttcgagctggagaacggccggaagcggatgctggccagcgccggcgagctgcagaagggcaacgagctggccctgcccagcaagtacgtgaacttcctgtacctggccagccactacgagaagctgaagggcagccccgaggacaacgagcagaagcagctgttcgtggagcagcacaagcactacctggacgagatcatcgagcagatcagcgagttcagcaagcgggtgatcctggccgacgccaacctggacaaggtgctgagcgcctacaacaagcaccgggacaagcccatccgggagcaggccgagaacatcatccacctgttcaccctgaccaacctgggcgcccccgccgccttcaagtacttcgacaccaccatcgaccggaagcggtacaccagcaccaaggaggtgctggacgccaccctgatccaccagagcatcaccggcctgtacgagacccggatcgacctgagccagctgggcggcgacggcggcggcagccccaagaagaagcggaaggtgtga

SEQ ID NO: 3532 - DNA, 4179 bp, Artificial Sequence
  Synthetic
atggacaagaagtactccatcggcctggacatcggcaccaactccgtgggctgggccgtgatcaccgacgagtacaaggtgccctccaagaagttcaaggtgctgggcaacaccgaccggcactccatcaagaagaacctgatcggcgccctgctgttcgactccggcgagaccgccgaggccacccggctgaagcggaccgcccggcggcggtacacccggcggaagaaccggatctgctacctgcaggagatcttctccaacgagatggccaaggtggacgactccttcttccaccggctggaggagtccttcctggtggaggaggacaagaagcacgagcggcaccccatcttcggcaacatcgtggacgaggtggcctaccacgagaagtaccccaccatctaccacctgcggaagaagctggtggactccaccgacaaggccgacctgcggctgatctacctggccctggcccacatgatcaagttccggggccacttcctgatcgagggcgacctgaaccccgacaactccgacgtggacaagctgttcatccagctggtgcagacctacaaccagctgttcgaggagaaccccatcaacgcctccggcgtggacgccaaggccatcctgtccgcccggctgtccaagtcccggcggctggagaacctgatcgcccagctgcccggcgagaagaagaacggcctgttcggcaacctgatcgccctgtccctgggcctgacccccaacttcaagtccaacttcgacctggccgaggacgccaagctgcagctgtccaaggacacctacgacgacgacctggacaacctgctggcccagatcggcgaccagtacgccgacctgttcctggccgccaagaacctgtccgacgccatcctgctgtccgacatcctgcgggtgaacaccgagatcaccaaggcccccctgtccgcctccatgatcaagcggtacgacgagcaccaccaggacctgaccctgctgaaggccctggtgcggcagcagctgcccgagaagtacaaggagatcttcttcgaccagtccaagaacggctacgccggctacatcgacggcggcgcctcccaggaggagttctacaagttcatcaagcccatcctggagaagatggacggcaccgaggagctgctggtgaagctgaaccgggaggacctgctgcggaagcagcggaccttcgacaacggctccatcccccaccagatccacctgggcgagctgcacgccatcctgcggcggcaggaggacttctaccccttcctgaaggacaaccgggagaagatcgagaagatcctgaccttccggatcccctactacgtgggccccctggcccggggcaactcccggttcgcctggatgacccggaagtccgaggagaccatcaccccctggaacttcgaggaggtggtggacaagggcgcctccgcccagtccttcatcgagcggatgaccaacttcgacaagaacctgcccaacgagaaggtgctgcccaagcactccctgctgtacgagtacttcaccgtgtacaacgagctgaccaaggtgaagtacgtgaccgagggcatgcggaagcccgccttcctgtccggcgagcagaagaaggccatcgtggacctgctgttcaagaccaaccggaaggtgaccgtgaagcagctgaaggaggactacttcaagaagatcgagtgcttcgactccgtggagatctccggcgtggaggaccggttcaacgcctccctgggcacctaccacgacctgctgaagatcatcaaggacaaggacttcctggacaacgaggagaacgaggacatcctggaggacatcgtgctgaccctgaccctgttcgaggaccgggagatgatcgaggagcggctgaagacctacgcccacctgttcgacgacaaggtgatgaagcagctgaagcggcggcggtacaccggctggggccggctgtcccggaagctgatcaacggcatccgggacaagcagtccggcaagaccatcctggacttcctgaagtccgacggcttcgccaaccggaacttcatgcagctgatccacgacgactccctgaccttcaaggaggacatccagaaggcccaggtgtccggccagggcgactccctgcacgagcacatcgccaacctggccggctcccccgccatcaagaagggcatcctgcagaccgtgaaggtggtggacgagctggtgaaggtgatgggccggcacaagcccgagaacatcgtgatcgagatggcccgggagaaccagaccacccagaagggccagaagaactcccgggagcggatgaagcggatcgaggagggcatcaaggagctgggctcccagatcctgaaggagcaccccgtggagaacacccagctgcagaacgagaagctgtacctgtactacctgcagaacggccgggacatgtacgtggaccaggagctggacatcaaccggctgtccgactacgacgtggaccacatcgtgccccagtccttcctgaaggacgactccatcgacaacaaggtgctgacccggtccgacaagaaccggggcaagtccgacaacgtgccctccgaggaggtggtgaagaagatgaagaactactggcggcagctgctgaacgccaagctgatcacccagcggaagttcgacaacctgaccaaggccgagcggggcggcctgtccgagctggacaaggccggcttcatcaagcggcagctggtggagacccggcagatcaccaagcacgtggcccagatcctggactcccggatgaacaccaagtacgacgagaacgacaagctgatccgggaggtgaaggtgatcaccctgaagtccaagctggtgtccgacttccggaaggacttccagttctacaaggtgcgggagatcaacaactaccaccacgcccacgacgcctacctgaacgccgtggtgggcaccgccctgatcaagaagtaccccaagctggagtccgagttcgtgtacggcgactacaaggtgtacgacgtgcggaagatgatcgccaagtccgagcaggagatcggcaaggccaccgccaagtacttcttctactccaacatcatgaacttcttcaagaccgagatcaccctggccaacggcgagatccggaagcggcccctgatcgagaccaacggcgagaccggcgagatcgtgtgggacaagggccgggacttcgccaccgtgcggaaggtgctgtccatgccccaggtgaacatcgtgaagaagaccgaggtgcagaccggcggcttctccaaggagtccatcctgcccaagcggaactccgacaagctgatcgcccggaagaaggactgggaccccaagaagtacggcggcttcgactcccccaccgtggcctactccgtgctggtggtggccaaggtggagaagggcaagtccaagaagctgaagtccgtgaaggagctgctgggcatcaccatcatggagcggtcctccttcgagaagaaccccatcgacttcctggaggccaagggctacaaggaggtgaagaaggacctgatcatcaagctgcccaagtactccctgttcgagctggagaacggccggaagcggatgctggcctccgccggcgagctgcagaagggcaacgagctggccctgccctccaagtacgtgaacttcctgtacctggcctcccactacgagaagctgaagggctcccccgaggacaacgagcagaagcagctgttcgtggagcagcacaagcactacctggacgagatcatcgagcagatctccgagttctccaagcgggtgatcctggccgacgccaacctggacaaggtgctgtccgcctacaacaagcaccgggacaagcccatccgggagcaggccgagaacatcatccacctgttcaccctgaccaacctgggcgcccccgccgccttcaagtacttcgacaccaccatcgaccggaagcggtacacctccaccaaggaggtgctggacgccaccctgatccaccagtccatcaccggcctgtacgagacccggatcgacctgtcccagctgggcggcgacggctccggctcccccaagaagaagcggaaggtggacggctcccccaagaagaagcggaaggtggactccggctga

SEQ ID NO: 3533 - DNA, 4140 bp, Artificial Sequence
  Synthetic
atggacaagaagtactccatcggcctggccatcggcaccaactccgtgggctgggccgtgatcaccgacgagtacaaggtgccctccaagaagttcaaggtgctgggcaacaccgaccggcactccatcaagaagaacctgatcggcgccctgctgttcgactccggcgagaccgccgaggccacccggctgaagcggaccgcccggcggcggtacacccggcggaagaaccggatctgctacctgcaggagatcttctccaacgagatggccaaggtggacgactccttcttccaccggctggaggagtccttcctggtggaggaggacaagaagcacgagcggcaccccatcttcggcaacatcgtggacgaggtggcctaccacgagaagtaccccaccatctaccacctgcggaagaagctggtggactccaccgacaaggccgacctgcggctgatctacctggccctggcccacatgatcaagttccggggccacttcctgatcgagggcgacctgaaccccgacaactccgacgtggacaagctgttcatccagctggtgcagacctacaaccagctgttcgaggagaaccccatcaacgcctccggcgtggacgccaaggccatcctgtccgcccggctgtccaagtcccggcggctggagaacctgatcgcccagctgcccggcgagaagaagaacggcctgttcggcaacctgatcgccctgtccctgggcctgacccccaacttcaagtccaacttcgacctggccgaggacgccaagctgcagctgtccaaggacacctacgacgacgacctggacaacctgctggcccagatcggcgaccagtacgccgacctgttcctggccgccaagaacctgtccgacgccatcctgctgtccgacatcctgcgggtgaacaccgagatcaccaaggcccccctgtccgcctccatgatcaagcggtacgacgagcaccaccaggacctgaccctgctgaaggccctggtgcggcagcagctgcccgagaagtacaaggagatcttcttcgaccagtccaagaacggctacgccggctacatcgacggcggcgcctcccaggaggagttctacaagttcatcaagcccatcctggagaagatggacggcaccgaggagctgctggtgaagctgaaccgggaggacctgctgcggaagcagcggaccttcgacaacggctccatcccccaccagatccacctgggcgagctgcacgccatcctgcggcggcaggaggacttctaccccttcctgaaggacaaccgggagaagatcgagaagatcctgaccttccggatcccctactacgtgggccccctggcccggggcaactcccggttcgcctggatgacccggaagtccgaggagaccatcaccccctggaacttcgaggaggtggtggacaagggcgcctccgcccagtccttcatcgagcggatgaccaacttcgacaagaacctgcccaacgagaaggtgctgcccaagcactccctgctgtacgagtacttcaccgtgtacaacgagctgaccaaggtgaagtacgtgaccgagggcatgcggaagcccgccttcctgtccggcgagcagaagaaggccatcgtggacctgctgttcaagaccaaccggaaggtgaccgtgaagcagctgaaggaggactacttcaagaagatcgagtgcttcgactccgtggagatctccggcgtggaggaccggttcaacgcctccctgggcacctaccacgacctgctgaagatcatcaaggacaaggacttcctggacaacgaggagaacgaggacatcctggaggacatcgtgctgaccctgaccctgttcgaggaccgggagatgatcgaggagcggctgaagacctacgcccacctgttcgacgacaaggtgatgaagcagctgaagcggcggcggtacaccggctggggccggctgtcccggaagctgatcaacggcatccgggacaagcagtccggcaagaccatcctggacttcctgaagtccgacggcttcgccaaccggaacttcatgcagctgatccacgacgactccctgaccttcaaggaggacatccagaaggcccaggtgtccggccagggcgactccctgcacgagcacatcgccaacctggccggctcccccgccatcaagaagggcatcctgcagaccgtgaaggtggtggacgagctggtgaaggtgatgggccggcacaagcccgagaacatcgtgatcgagatggcccgggagaaccagaccacccagaagggccagaagaactcccgggagcggatgaagcggatcgaggagggcatcaaggagctgggctcccagatcctgaaggagcaccccgtggagaacacccagctgcagaacgagaagctgtacctgtactacctgcagaacggccgggacatgtacgtggaccaggagctggacatcaaccggctgtccgactacgacgtggaccacatcgtgccccagtccttcctgaaggacgactccatcgacaacaaggtgctgacccggtccgacaagaaccggggcaagtccgacaacgtgccctccgaggaggtggtgaagaagatgaagaactactggcggcagctgctgaacgccaagctgatcacccagcggaagttcgacaacctgaccaaggccgagcggggcggcctgtccgagctggacaaggccggcttcatcaagcggcagctggtggagacccggcagatcaccaagcacgtggcccagatcctggactcccggatgaacaccaagtacgacgagaacgacaagctgatccgggaggtgaaggtgatcaccctgaagtccaagctggtgtccgacttccggaaggacttccagttctacaaggtgcgggagatcaacaactaccaccacgcccacgacgcctacctgaacgccgtggtgggcaccgccctgatcaagaagtaccccaagctggagtccgagttcgtgtacggcgactacaaggtgtacgacgtgcggaagatgatcgccaagtccgagcaggagatcggcaaggccaccgccaagtacttcttctactccaacatcatgaacttcttcaagaccgagatcaccctggccaacggcgagatccggaagcggcccctgatcgagaccaacggcgagaccggcgagatcgtgtgggacaagggccgggacttcgccaccgtgcggaaggtgctgtccatgccccaggtgaacatcgtgaagaagaccgaggtgcagaccggcggcttctccaaggagtccatcctgcccaagcggaactccgacaagctgatcgcccggaagaaggactgggaccccaagaagtacggcggcttcgactcccccaccgtggcctactccgtgctggtggtggccaaggtggagaagggcaagtccaagaagctgaagtccgtgaaggagctgctgggcatcaccatcatggagcggtcctccttcgagaagaaccccatcgacttcctggaggccaagggctacaaggaggtgaagaaggacctgatcatcaagctgcccaagtactccctgttcgagctggagaacggccggaagcggatgctggcctccgccggcgagctgcagaagggcaacgagctggccctgccctccaagtacgtgaacttcctgtacctggcctcccactacgagaagctgaagggctcccccgaggacaacgagcagaagcagctgttcgtggagcagcacaagcactacctggacgagatcatcgagcagatctccgagttctccaagcgggtgatcctggccgacgccaacctggacaaggtgctgtccgcctacaacaagcaccgggacaagcccatccgggagcaggccgagaacatcatccacctgttcaccctgaccaacctgggcgcccccgccgccttcaagtacttcgacaccaccatcgaccggaagcggtacacctccaccaaggaggtgctggacgccaccctgatccaccagtccatcaccggcctgtacgagacccggatcgacctgtcccagctgggcggcgacggcggcggctcccccaagaagaagcggaaggtgtga

SEQ ID NO: 3534 - DNA, 4107 bp, Artificial Sequence
  Synthetic
atggacaagaagtactccatcggcctggccatcggcaccaactccgtgggctgggccgtgatcaccgacgagtacaaggtgccctccaagaagttcaaggtgctgggcaacaccgaccggcactccatcaagaagaacctgatcggcgccctgctgttcgactccggcgagaccgccgaggccacccggctgaagcggaccgcccggcggcggtacacccggcggaagaaccggatctgctacctgcaggagatcttctccaacgagatggccaaggtggacgactccttcttccaccggctggaggagtccttcctggtggaggaggacaagaagcacgagcggcaccccatcttcggcaacatcgtggacgaggtggcctaccacgagaagtaccccaccatctaccacctgcggaagaagctggtggactccaccgacaaggccgacctgcggctgatctacctggccctggcccacatgatcaagttccggggccacttcctgatcgagggcgacctgaaccccgacaactccgacgtggacaagctgttcatccagctggtgcagacctacaaccagctgttcgaggagaaccccatcaacgcctccggcgtggacgccaaggccatcctgtccgcccggctgtccaagtcccggcggctggagaacctgatcgcccagctgcccggcgagaagaagaacggcctgttcggcaacctgatcgccctgtccctgggcctgacccccaacttcaagtccaacttcgacctggccgaggacgccaagctgcagctgtccaaggacacctacgacgacgacctggacaacctgctggcccagatcggcgaccagtacgccgacctgttcctggccgccaagaacctgtccgacgccatcctgctgtccgacatcctgcgggtgaacaccgagatcaccaaggcccccctgtccgcctccatgatcaagcggtacgacgagcaccaccaggacctgaccctgctgaaggccctggtgcggcagcagctgcccgagaagtacaaggagatcttcttcgaccagtccaagaacggctacgccggctacatcgacggcggcgcctcccaggaggagttctacaagttcatcaagcccatcctggagaagatggacggcaccgaggagctgctggtgaagctgaaccgggaggacctgctgcggaagcagcggaccttcgacaacggctccatcccccaccagatccacctgggcgagctgcacgccatcctgcggcggcaggaggacttctaccccttcctgaaggacaaccgggagaagatcgagaagatcctgaccttccggatcccctactacgtgggccccctggcccggggcaactcccggttcgcctggatgacccggaagtccgaggagaccatcaccccctggaacttcgaggaggtggtggacaagggcgcctccgcccagtccttcatcgagcggatgaccaacttcgacaagaacctgcccaacgagaaggtgctgcccaagcactccctgctgtacgagtacttcaccgtgtacaacgagctgaccaaggtgaagtacgtgaccgagggcatgcggaagcccgccttcctgtccggcgagcagaagaaggccatcgtggacctgctgttcaagaccaaccggaaggtgaccgtgaagcagctgaaggaggactacttcaagaagatcgagtgcttcgactccgtggagatctccggcgtggaggaccggttcaacgcctccctgggcacctaccacgacctgctgaagatcatcaaggacaaggacttcctggacaacgaggagaacgaggacatcctggaggacatcgtgctgaccctgaccctgttcgaggaccgggagatgatcgaggagcggctgaagacctacgcccacctgttcgacgacaaggtgatgaagcagctgaagcggcggcggtacaccggctggggccggctgtcccggaagctgatcaacggcatccgggacaagcagtccggcaagaccatcctggacttcctgaagtccgacggcttcgccaaccggaacttcatgcagctgatccacgacgactccctgaccttcaaggaggacatccagaaggcccaggtgtccggccagggcgactccctgcacgagcacatcgccaacctggccggctcccccgccatcaagaagggcatcctgcagaccgtgaaggtggtggacgagctggtgaaggtgatgggccggcacaagcccgagaacatcgtgatcgagatggcccgggagaaccagaccacccagaagggccagaagaactcccgggagcggatgaagcggatcgaggagggcatcaaggagctgggctcccagatcctgaaggagcaccccgtggagaacacccagctgcagaacgagaagctgtacctgtactacctgcagaacggccgggacatgtacgtggaccaggagctggacatcaaccggctgtccgactacgacgtggaccacatcgtgccccagtccttcctgaaggacgactccatcgacaacaaggtgctgacccggtccgacaagaaccggggcaagtccgacaacgtgccctccgaggaggtggtgaagaagatgaagaactactggcggcagctgctgaacgccaagctgatcacccagcggaagttcgacaacctgaccaaggccgagcggggcggcctgtccgagctggacaaggccggcttcatcaagcggcagctggtggagacccggcagatcaccaagcacgtggcccagatcctggactcccggatgaacaccaagtacgacgagaacgacaagctgatccgggaggtgaaggtgatcaccctgaagtccaagctggtgtccgacttccggaaggacttccagttctacaaggtgcgggagatcaacaactaccaccacgcccacgacgcctacctgaacgccgtggtgggcaccgccctgatcaagaagtaccccaagctggagtccgagttcgtgtacggcgactacaaggtgtacgacgtgcggaagatgatcgccaagtccgagcaggagatcggcaaggccaccgccaagtacttcttctactccaacatcatgaacttcttcaagaccgagatcaccctggccaacggcgagatccggaagcggcccctgatcgagaccaacggcgagaccggcgagatcgtgtgggacaagggccgggacttcgccaccgtgcggaaggtgctgtccatgccccaggtgaacatcgtgaagaagaccgaggtgcagaccggcggcttctccaaggagtccatcctgcccaagcggaactccgacaagctgatcgcccggaagaaggactgggaccccaagaagtacggcggcttcgactcccccaccgtggcctactccgtgctggtggtggccaaggtggagaagggcaagtccaagaagctgaagtccgtgaaggagctgctgggcatcaccatcatggagcggtcctccttcgagaagaaccccatcgacttcctggaggccaagggctacaaggaggtgaagaaggacctgatcatcaagctgcccaagtactccctgttcgagctggagaacggccggaagcggatgctggcctccgccggcgagctgcagaagggcaacgagctggccctgccctccaagtacgtgaacttcctgtacctggcctcccactacgagaagctgaagggctcccccgaggacaacgagcagaagcagctgttcgtggagcagcacaagcactacctggacgagatcatcgagcagatctccgagttctccaagcgggtgatcctggccgacgccaacctggacaaggtgctgtccgcctacaacaagcaccgggacaagcccatccgggagcaggccgagaacatcatccacctgttcaccctgaccaacctgggcgcccccgccgccttcaagtacttcgacaccaccatcgaccggaagcggtacacctccaccaaggaggtgctggacgccaccctgatccaccagtccatcaccggcctgtacgagacccggatcgacctgtcccagctgggcggcgactga

SEQ ID NO: 3535 - DNA, 4179 bp, Artificial Sequence
  Synthetic
atggacaagaagtactccatcggcctggccatcggcaccaactccgtgggctgggccgtgatcaccgacgagtacaaggtgccctccaagaagttcaaggtgctgggcaacaccgaccggcactccatcaagaagaacctgatcggcgccctgctgttcgactccggcgagaccgccgaggccacccggctgaagcggaccgcccggcggcggtacacccggcggaagaaccggatctgctacctgcaggagatcttctccaacgagatggccaaggtggacgactccttcttccaccggctggaggagtccttcctggtggaggaggacaagaagcacgagcggcaccccatcttcggcaacatcgtggacgaggtggcctaccacgagaagtaccccaccatctaccacctgcggaagaagctggtggactccaccgacaaggccgacctgcggctgatctacctggccctggcccacatgatcaagttccggggccacttcctgatcgagggcgacctgaaccccgacaactccgacgtggacaagctgttcatccagctggtgcagacctacaaccagctgttcgaggagaaccccatcaacgcctccggcgtggacgccaaggccatcctgtccgcccggctgtccaagtcccggcggctggagaacctgatcgcccagctgcccggcgagaagaagaacggcctgttcggcaacctgatcgccctgtccctgggcctgacccccaacttcaagtccaacttcgacctggccgaggacgccaagctgcagctgtccaaggacacctacgacgacgacctggacaacctgctggcccagatcggcgaccagtacgccgacctgttcctggccgccaagaacctgtccgacgccatcctgctgtccgacatcctgcgggtgaacaccgagatcaccaaggcccccctgtccgcctccatgatcaagcggtacgacgagcaccaccaggacctgaccctgctgaaggccctggtgcggcagcagctgcccgagaagtacaaggagatcttcttcgaccagtccaagaacggctacgccggctacatcgacggcggcgcctcccaggaggagttctacaagttcatcaagcccatcctggagaagatggacggcaccgaggagctgctggtgaagctgaaccgggaggacctgctgcggaagcagcggaccttcgacaacggctccatcccccaccagatccacctgggcgagctgcacgccatcctgcggcggcaggaggacttctaccccttcctgaaggacaaccgggagaagatcgagaagatcctgaccttccggatcccctactacgtgggccccctggcccggggcaactcccggttcgcctggatgacccggaagtccgaggagaccatcaccccctggaacttcgaggaggtggtggacaagggcgcctccgcccagtccttcatcgagcggatgaccaacttcgacaagaacctgcccaacgagaaggtgctgcccaagcactccctgctgtacgagtacttcaccgtgtacaacgagctgaccaaggtgaagtacgtgaccgagggcatgcggaagcccgccttcctgtccggcgagcagaagaaggccatcgtggacctgctgttcaagaccaaccggaaggtgaccgtgaagcagctgaaggaggactacttcaagaagatcgagtgcttcgactccgtggagatctccggcgtggaggaccggttcaacgcctccctgggcacctaccacgacctgctgaagatcatcaaggacaaggacttcctggacaacgaggagaacgaggacatcctggaggacatcgtgctgaccctgaccctgttcgaggaccgggagatgatcgaggagcggctgaagacctacgcccacctgttcgacgacaaggtgatgaagcagctgaagcggcggcggtacaccggctggggccggctgtcccggaagctgatcaacggcatccgggacaagcagtccggcaagaccatcctggacttcctgaagtccgacggcttcgccaaccggaacttcatgcagctgatccacgacgactccctgaccttcaaggaggacatccagaaggcccaggtgtccggccagggcgactccctgcacgagcacatcgccaacctggccggctcccccgccatcaagaagggcatcctgcagaccgtgaaggtggtggacgagctggtgaaggtgatgggccggcacaagcccgagaacatcgtgatcgagatggcccgggagaaccagaccacccagaagggccagaagaactcccgggagcggatgaagcggatcgaggagggcatcaaggagctgggctcccagatcctgaaggagcaccccgtggagaacacccagctgcagaacgagaagctgtacctgtactacctgcagaacggccgggacatgtacgtggaccaggagctggacatcaaccggctgtccgactacgacgtggaccacatcgtgccccagtccttcctgaaggacgactccatcgacaacaaggtgctgacccggtccgacaagaaccggggcaagtccgacaacgtgccctccgaggaggtggtgaagaagatgaagaactactggcggcagctgctgaacgccaagctgatcacccagcggaagttcgacaacctgaccaaggccgagcggggcggcctgtccgagctggacaaggccggcttcatcaagcggcagctggtggagacccggcagatcaccaagcacgtggcccagatcctggactcccggatgaacaccaagtacgacgagaacgacaagctgatccgggaggtgaaggtgatcaccctgaagtccaagctggtgtccgacttccggaaggacttccagttctacaaggtgcgggagatcaacaactaccaccacgcccacgacgcctacctgaacgccgtggtgggcaccgccctgatcaagaagtaccccaagctggagtccgagttcgtgtacggcgactacaaggtgtacgacgtgcggaagatgatcgccaagtccgagcaggagatcggcaaggccaccgccaagtacttcttctactccaacatcatgaacttcttcaagaccgagatcaccctggccaacggcgagatccggaagcggcccctgatcgagaccaacggcgagaccggcgagatcgtgtgggacaagggccgggacttcgccaccgtgcggaaggtgctgtccatgccccaggtgaacatcgtgaagaagaccgaggtgcagaccggcggcttctccaaggagtccatcctgcccaagcggaactccgacaagctgatcgcccggaagaaggactgggaccccaagaagtacggcggcttcgactcccccaccgtggcctactccgtgctggtggtggccaaggtggagaagggcaagtccaagaagctgaagtccgtgaaggagctgctgggcatcaccatcatggagcggtcctccttcgagaagaaccccatcgacttcctggaggccaagggctacaaggaggtgaagaaggacctgatcatcaagctgcccaagtactccctgttcgagctggagaacggccggaagcggatgctggcctccgccggcgagctgcagaagggcaacgagctggccctgccctccaagtacgtgaacttcctgtacctggcctcccactacgagaagctgaagggctcccccgaggacaacgagcagaagcagctgttcgtggagcagcacaagcactacctggacgagatcatcgagcagatctccgagttctccaagcgggtgatcctggccgacgccaacctggacaaggtgctgtccgcctacaacaagcaccgggacaagcccatccgggagcaggccgagaacatcatccacctgttcaccctgaccaacctgggcgcccccgccgccttcaagtacttcgacaccaccatcgaccggaagcggtacacctccaccaaggaggtgctggacgccaccctgatccaccagtccatcaccggcctgtacgagacccggatcgacctgtcccagctgggcggcgacggctccggctcccccaagaagaagcggaaggtggacggctcccccaagaagaagcggaaggtggactccggctga

SEQ ID NO: 3536 - DNA, 4140 bp, Artificial Sequence
  Synthetic
atggacaagaagtactccatcggcctggccatcggcaccaactccgtgggctgggccgtgatcaccgacgagtacaaggtgccctccaagaagttcaaggtgctgggcaacaccgaccggcactccatcaagaagaacctgatcggcgccctgctgttcgactccggcgagaccgccgaggccacccggctgaagcggaccgcccggcggcggtacacccggcggaagaaccggatctgctacctgcaggagatcttctccaacgagatggccaaggtggacgactccttcttccaccggctggaggagtccttcctggtggaggaggacaagaagcacgagcggcaccccatcttcggcaacatcgtggacgaggtggcctaccacgagaagtaccccaccatctaccacctgcggaagaagctggtggactccaccgacaaggccgacctgcggctgatctacctggccctggcccacatgatcaagttccggggccacttcctgatcgagggcgacctgaaccccgacaactccgacgtggacaagctgttcatccagctggtgcagacctacaaccagctgttcgaggagaaccccatcaacgcctccggcgtggacgccaaggccatcctgtccgcccggctgtccaagtcccggcggctggagaacctgatcgcccagctgcccggcgagaagaagaacggcctgttcggcaacctgatcgccctgtccctgggcctgacccccaacttcaagtccaacttcgacctggccgaggacgccaagctgcagctgtccaaggacacctacgacgacgacctggacaacctgctggcccagatcggcgaccagtacgccgacctgttcctggccgccaagaacctgtccgacgccatcctgctgtccgacatcctgcgggtgaacaccgagatcaccaaggcccccctgtccgcctccatgatcaagcggtacgacgagcaccaccaggacctgaccctgctgaaggccctggtgcggcagcagctgcccgagaagtacaaggagatcttcttcgaccagtccaagaacggctacgccggctacatcgacggcggcgcctcccaggaggagttctacaagttcatcaagcccatcctggagaagatggacggcaccgaggagctgctggtgaagctgaaccgggaggacctgctgcggaagcagcggaccttcgacaacggctccatcccccaccagatccacctgggcgagctgcacgccatcctgcggcggcaggaggacttctaccccttcctgaaggacaaccgggagaagatcgagaagatcctgaccttccggatcccctactacgtgggccccctggcccggggcaactcccggttcgcctggatgacccggaagtccgaggagaccatcaccccctggaacttcgaggaggtggtggacaagggcgcctccgcccagtccttcatcgagcggatgaccaacttcgacaagaacctgcccaacgagaaggtgctgcccaagcactccctgctgtacgagtacttcaccgtgtacaacgagctgaccaaggtgaagtacgtgaccgagggcatgcggaagcccgccttcctgtccggcgagcagaagaaggccatcgtggacctgctgttcaagaccaaccggaaggtgaccgtgaagcagctgaaggaggactacttcaagaagatcgagtgcttcgactccgtggagatctccggcgtggaggaccggttcaacgcctccctgggcacctaccacgacctgctgaagatcatcaaggacaaggacttcctggacaacgaggagaacgaggacatcctggaggacatcgtgctgaccctgaccctgttcgaggaccgggagatgatcgaggagcggctgaagacctacgcccacctgttcgacgacaaggtgatgaagcagctgaagcggcggcggtacaccggctggggccggctgtcccggaagctgatcaacggcatccgggacaagcagtccggcaagaccatcctggacttcctgaagtccgacggcttcgccaaccggaacttcatgcagctgatccacgacgactccctgaccttcaaggaggacatccagaaggcccaggtgtccggccagggcgactccctgcacgagcacatcgccaacctggccggctcccccgccatcaagaagggcatcctgcagaccgtgaaggtggtggacgagctggtgaaggtgatgggccggcacaagcccgagaacatcgtgatcgagatggcccgggagaaccagaccacccagaagggccagaagaactcccgggagcggatgaagcggatcgaggagggcatcaaggagctgggctcccagatcctgaaggagcaccccgtggagaacacccagctgcagaacgagaagctgtacctgtactacctgcagaacggccgggacatgtacgtggaccaggagctggacatcaaccggctgtccgactacgacgtggacgccatcgtgccccagtccttcctgaaggacgactccatcgacaacaaggtgctgacccggtccgacaagaaccggggcaagtccgacaacgtgccctccgaggaggtggtgaagaagatgaagaactactggcggcagctgctgaacgccaagctgatcacccagcggaagttcgacaacctgaccaaggccgagcggggcggcctgtccgagctggacaaggccggcttcatcaagcggcagctggtggagacccggcagatcaccaagcacgtggcccagatcctggactcccggatgaacaccaagtacgacgagaacgacaagctgatccgggaggtgaaggtgatcaccctgaagtccaagctggtgtccgacttccggaaggacttccagttctacaaggtgcgggagatcaacaactaccaccacgcccacgacgcctacctgaacgccgtggtgggcaccgccctgatcaagaagtaccccaagctggagtccgagttcgtgtacggcgactacaaggtgtacgacgtgcggaagatgatcgccaagtccgagcaggagatcggcaaggccaccgccaagtacttcttctactccaacatcatgaacttcttcaagaccgagatcaccctggccaacggcgagatccggaagcggcccctgatcgagaccaacggcgagaccggcgagatcgtgtgggacaagggccgggacttcgccaccgtgcggaaggtgctgtccatgccccaggtgaacatcgtgaagaagaccgaggtgcagaccggcggcttctccaaggagtccatcctgcccaagcggaactccgacaagctgatcgcccggaagaaggactgggaccccaagaagtacggcggcttcgactcccccaccgtggcctactccgtgctggtggtggccaaggtggagaagggcaagtccaagaagctgaagtccgtgaaggagctgctgggcatcaccatcatggagcggtcctccttcgagaagaaccccatcgacttcctggaggccaagggctacaaggaggtgaagaaggacctgatcatcaagctgcccaagtactccctgttcgagctggagaacggccggaagcggatgctggcctccgccggcgagctgcagaagggcaacgagctggccctgccctccaagtacgtgaacttcctgtacctggcctcccactacgagaagctgaagggctcccccgaggacaacgagcagaagcagctgttcgtggagcagcacaagcactacctggacgagatcatcgagcagatctccgagttctccaagcgggtgatcctggccgacgccaacctggacaaggtgctgtccgcctacaacaagcaccgggacaagcccatccgggagcaggccgagaacatcatccacctgttcaccctgaccaacctgggcgcccccgccgccttcaagtacttcgacaccaccatcgaccggaagcggtacacctccaccaaggaggtgctggacgccaccctgatccaccagtccatcaccggcctgtacgagacccggatcgacctgtcccagctgggcggcgacggcggcggctcccccaagaagaagcggaaggtgtga

SEQ ID NO: 3537 - DNA, 4107 bp, Artificial Sequence
  Synthetic
atggacaagaagtactccatcggcctggccatcggcaccaactccgtgggctgggccgtgatcaccgacgagtacaaggtgccctccaagaagttcaaggtgctgggcaacaccgaccggcactccatcaagaagaacctgatcggcgccctgctgttcgactccggcgagaccgccgaggccacccggctgaagcggaccgcccggcggcggtacacccggcggaagaaccggatctgctacctgcaggagatcttctccaacgagatggccaaggtggacgactccttcttccaccggctggaggagtccttcctggtggaggaggacaagaagcacgagcggcaccccatcttcggcaacatcgtggacgaggtggcctaccacgagaagtaccccaccatctaccacctgcggaagaagctggtggactccaccgacaaggccgacctgcggctgatctacctggccctggcccacatgatcaagttccggggccacttcctgatcgagggcgacctgaaccccgacaactccgacgtggacaagctgttcatccagctggtgcagacctacaaccagctgttcgaggagaaccccatcaacgcctccggcgtggacgccaaggccatcctgtccgcccggctgtccaagtcccggcggctggagaacctgatcgcccagctgcccggcgagaagaagaacggcctgttcggcaacctgatcgccctgtccctgggcctgacccccaacttcaagtccaacttcgacctggccgaggacgccaagctgcagctgtccaaggacacctacgacgacgacctggacaacctgctggcccagatcggcgaccagtacgccgacctgttcctggccgccaagaacctgtccgacgccatcctgctgtccgacatcctgcgggtgaacaccgagatcaccaaggcccccctgtccgcctccatgatcaagcggtacgacgagcaccaccaggacctgaccctgctgaaggccctggtgcggcagcagctgcccgagaagtacaaggagatcttcttcgaccagtccaagaacggctacgccggctacatcgacggcggcgcctcccaggaggagttctacaagttcatcaagcccatcctggagaagatggacggcaccgaggagctgctggtgaagctgaaccgggaggacctgctgcggaagcagcggaccttcgacaacggctccatcccccaccagatccacctgggcgagctgcacgccatcctgcggcggcaggaggacttctaccccttcctgaaggacaaccgggagaagatcgagaagatcctgaccttccggatcccctactacgtgggccccctggcccggggcaactcccggttcgcctggatgacccggaagtccgaggagaccatcaccccctggaacttcgaggaggtggtggacaagggcgcctccgcccagtccttcatcgagcggatgaccaacttcgacaagaacctgcccaacgagaaggtgctgcccaagcactccctgctgtacgagtacttcaccgtgtacaacgagctgaccaaggtgaagtacgtgaccgagggcatgcggaagcccgccttcctgtccggcgagcagaagaaggccatcgtggacctgctgttcaagaccaaccggaaggtgaccgtgaagcagctgaaggaggactacttcaagaagatcgagtgcttcgactccgtggagatctccggcgtggaggaccggttcaacgcctccctgggcacctaccacgacctgctgaagatcatcaaggacaaggacttcctggacaacgaggagaacgaggacatcctggaggacatcgtgctgaccctgaccctgttcgaggaccgggagatgatcgaggagcggctgaagacctacgcccacctgttcgacgacaaggtgatgaagcagctgaagcggcggcggtacaccggctggggccggctgtcccggaagctgatcaacggcatccgggacaagcagtccggcaagaccatcctggacttcctgaagtccgacggcttcgccaaccggaacttcatgcagctgatccacgacgactccctgaccttcaaggaggacatccagaaggcccaggtgtccggccagggcgactccctgcacgagcacatcgccaacctggccggctcccccgccatcaagaagggcatcctgcagaccgtgaaggtggtggacgagctggtgaaggtgatgggccggcacaagcccgagaacatcgtgatcgagatggcccgggagaaccagaccacccagaagggccagaagaactcccgggagcggatgaagcggatcgaggagggcatcaaggagctgggctcccagatcctgaaggagcaccccgtggagaacacccagctgcagaacgagaagctgtacctgtactacctgcagaacggccgggacatgtacgtggaccaggagctggacatcaaccggctgtccgactacgacgtggacgccatcgtgccccagtccttcctgaaggacgactccatcgacaacaaggtgctgacccggtccgacaagaaccggggcaagtccgacaacgtgccctccgaggaggtggtgaagaagatgaagaactactggcggcagctgctgaacgccaagctgatcacccagcggaagttcgacaacctgaccaaggccgagcggggcggcctgtccgagctggacaaggccggcttcatcaagcggcagctggtggagacccggcagatcaccaagcacgtggcccagatcctggactcccggatgaacaccaagtacgacgagaacgacaagctgatccgggaggtgaaggtgatcaccctgaagtccaagctggtgtccgacttccggaaggacttccagttctacaaggtgcgggagatcaacaactaccaccacgcccacgacgcctacctgaacgccgtggtgggcaccgccctgatcaagaagtaccccaagctggagtccgagttcgtgtacggcgactacaaggtgtacgacgtgcggaagatgatcgccaagtccgagcaggagatcggcaaggccaccgccaagtacttcttctactccaacatcatgaacttcttcaagaccgagatcaccctggccaacggcgagatccggaagcggcccctgatcgagaccaacggcgagaccggcgagatcgtgtgggacaagggccgggacttcgccaccgtgcggaaggtgctgtccatgccccaggtgaacatcgtgaagaagaccgaggtgcagaccggcggcttctccaaggagtccatcctgcccaagcggaactccgacaagctgatcgcccggaagaaggactgggaccccaagaagtacggcggcttcgactcccccaccgtggcctactccgtgctggtggtggccaaggtggagaagggcaagtccaagaagctgaagtccgtgaaggagctgctgggcatcaccatcatggagcggtcctccttcgagaagaaccccatcgacttcctggaggccaagggctacaaggaggtgaagaaggacctgatcatcaagctgcccaagtactccctgttcgagctggagaacggccggaagcggatgctggcctccgccggcgagctgcagaagggcaacgagctggccctgccctccaagtacgtgaacttcctgtacctggcctcccactacgagaagctgaagggctcccccgaggacaacgagcagaagcagctgttcgtggagcagcacaagcactacctggacgagatcatcgagcagatctccgagttctccaagcgggtgatcctggccgacgccaacctggacaaggtgctgtccgcctacaacaagcaccgggacaagcccatccgggagcaggccgagaacatcatccacctgttcaccctgaccaacctgggcgcccccgccgccttcaagtacttcgacaccaccatcgaccggaagcggtacacctccaccaaggaggtgctggacgccaccctgatccaccagtccatcaccggcctgtacgagacccggatcgacctgtcccagctgggcggcgactga

SEQ ID NO: 3538 - DNA, 4179 bp, Artificial Sequence
  Synthetic
atggacaagaagtactccatcggcctggccatcggcaccaactccgtgggctgggccgtgatcaccgacgagtacaaggtgccctccaagaagttcaaggtgctgggcaacaccgaccggcactccatcaagaagaacctgatcggcgccctgctgttcgactccggcgagaccgccgaggccacccggctgaagcggaccgcccggcggcggtacacccggcggaagaaccggatctgctacctgcaggagatcttctccaacgagatggccaaggtggacgactccttcttccaccggctggaggagtccttcctggtggaggaggacaagaagcacgagcggcaccccatcttcggcaacatcgtggacgaggtggcctaccacgagaagtaccccaccatctaccacctgcggaagaagctggtggactccaccgacaaggccgacctgcggctgatctacctggccctggcccacatgatcaagttccggggccacttcctgatcgagggcgacctgaaccccgacaactccgacgtggacaagctgttcatccagctggtgcagacctacaaccagctgttcgaggagaaccccatcaacgcctccggcgtggacgccaaggccatcctgtccgcccggctgtccaagtcccggcggctggagaacctgatcgcccagctgcccggcgagaagaagaacggcctgttcggcaacctgatcgccctgtccctgggcctgacccccaacttcaagtccaacttcgacctggccgaggacgccaagctgcagctgtccaaggacacctacgacgacgacctggacaacctgctggcccagatcggcgaccagtacgccgacctgttcctggccgccaagaacctgtccgacgccatcctgctgtccgacatcctgcgggtgaacaccgagatcaccaaggcccccctgtccgcctccatgatcaagcggtacgacgagcaccaccaggacctgaccctgctgaaggccctggtgcggcagcagctgcccgagaagtacaaggagatcttcttcgaccagtccaagaacggctacgccggctacatcgacggcggcgcctcccaggaggagttctacaagttcatcaagcccatcctggagaagatggacggcaccgaggagctgctggtgaagctgaaccgggaggacctgctgcggaagcagcggaccttcgacaacggctccatcccccaccagatccacctgggcgagctgcacgccatcctgcggcggcaggaggacttctaccccttcctgaaggacaaccgggagaagatcgagaagatcctgaccttccggatcccctactacgtgggccccctggcccggggcaactcccggttcgcctggatgacccggaagtccgaggagaccatcaccccctggaacttcgaggaggtggtggacaagggcgcctccgcccagtccttcatcgagcggatgaccaacttcgacaagaacctgcccaacgagaaggtgctgcccaagcactccctgctgtacgagtacttcaccgtgtacaacgagctgaccaaggtgaagtacgtgaccgagggcatgcggaagcccgccttcctgtccggcgagcagaagaaggccatcgtggacctgctgttcaagaccaaccggaaggtgaccgtgaagcagctgaaggaggactacttcaagaagatcgagtgcttcgactccgtggagatctccggcgtggaggaccggttcaacgcctccctgggcacctaccacgacctgctgaagatcatcaaggacaaggacttcctggacaacgaggagaacgaggacatcctggaggacatcgtgctgaccctgaccctgttcgaggaccgggagatgatcgaggagcggctgaagacctacgcccacctgttcgacgacaaggtgatgaagcagctgaagcggcggcggtacaccggctggggccggctgtcccggaagctgatcaacggcatccgggacaagcagtccggcaagaccatcctggacttcctgaagtccgacggcttcgccaaccggaacttcatgcagctgatccacgacgactccctgaccttcaaggaggacatccagaaggcccaggtgtccggccagggcgactccctgcacgagcacatcgccaacctggccggctcccccgccatcaagaagggcatcctgcagaccgtgaaggtggtggacgagctggtgaaggtgatgggccggcacaagcccgagaacatcgtgatcgagatggcccgggagaaccagaccacccagaagggccagaagaactcccgggagcggatgaagcggatcgaggagggcatcaaggagctgggctcccagatcctgaaggagcaccccgtggagaacacccagctgcagaacgagaagctgtacctgtactacctgcagaacggccgggacatgtacgtggaccaggagctggacatcaaccggctgtccgactacgacgtggacgccatcgtgccccagtccttcctgaaggacgactccatcgacaacaaggtgctgacccggtccgacaagaaccggggcaagtccgacaacgtgccctccgaggaggtggtgaagaagatgaagaactactggcggcagctgctgaacgccaagctgatcacccagcggaagttcgacaacctgaccaaggccgagcggggcggcctgtccgagctggacaaggccggcttcatcaagcggcagctggtggagacccggcagatcaccaagcacgtggcccagatcctggactcccggatgaacaccaagtacgacgagaacgacaagctgatccgggaggtgaaggtgatcaccctgaagtccaagctggtgtccgacttccggaaggacttccagttctacaaggtgcgggagatcaacaactaccaccacgcccacgacgcctacctgaacgccgtggtgggcaccgccctgatcaagaagtaccccaagctggagtccgagttcgtgtacggcgactacaaggtgtacgacgtgcggaagatgatcgccaagtccgagcaggagatcggcaaggccaccgccaagtacttcttctactccaacatcatgaacttcttcaagaccgagatcaccctggccaacggcgagatccggaagcggcccctgatcgagaccaacggcgagaccggcgagatcgtgtgggacaagggccgggacttcgccaccgtgcggaaggtgctgtccatgccccaggtgaacatcgtgaagaagaccgaggtgcagaccggcggcttctccaaggagtccatcctgcccaagcggaactccgacaagctgatcgcccggaagaaggactgggaccccaagaagtacggcggcttcgactcccccaccgtggcctactccgtgctggtggtggccaaggtggagaagggcaagtccaagaagctgaagtccgtgaaggagctgctgggcatcaccatcatggagcggtcctccttcgagaagaaccccatcgacttcctggaggccaagggctacaaggaggtgaagaaggacctgatcatcaagctgcccaagtactccctgttcgagctggagaacggccggaagcggatgctggcctccgccggcgagctgcagaagggcaacgagctggccctgccctccaagtacgtgaacttcctgtacctggcctcccactacgagaagctgaagggctcccccgaggacaacgagcagaagcagctgttcgtggagcagcacaagcactacctggacgagatcatcgagcagatctccgagttctccaagcgggtgatcctggccgacgccaacctggacaaggtgctgtccgcctacaacaagcaccgggacaagcccatccgggagcaggccgagaacatcatccacctgttcaccctgaccaacctgggcgcccccgccgccttcaagtacttcgacaccaccatcgaccggaagcggtacacctccaccaaggaggtgctggacgccaccctgatccaccagtccatcaccggcctgtacgagacccggatcgacctgtcccagctgggcggcgacggctccggctcccccaagaagaagcggaaggtggacggctcccccaagaagaagcggaaggtggactccggctga

SEQ ID NO: 3539 - DNA, 4179 bp, Artificial Sequence
  Synthetic
atggacaagaagtacagcatcggcctggacatcggcaccaacagcgtgggctgggccgtgatcaccgacgagtacaaggtgcccagcaagaagttcaaggtgctgggcaacaccgaccggcacagcatcaagaagaacctgatcggcgccctgctgttcgacagcggcgagaccgccgaggccacccggctgaagcggaccgcccggcggcggtacacccggcggaagaaccggatctgctacctgcaggagatcttcagcaacgagatggccaaggtggacgacagcttcttccaccggctggaggagagcttcctggtggaggaggacaagaagcacgagcggcaccccatcttcggcaacatcgtggacgaggtggcctaccacgagaagtaccccaccatctaccacctgcggaagaagctggtggacagcaccgacaaggccgacctgcggctgatctacctggccctggcccacatgatcaagttccggggccacttcctgatcgagggcgacctgaaccccgacaacagcgacgtggacaagctgttcatccagctggtgcagacctacaaccagctgttcgaggagaaccccatcaacgccagcggcgtggacgccaaggccatcctgagcgcccggctgagcaagagccggcggctggagaacctgatcgcccagctgcccggcgagaagaagaacggcctgttcggcaacctgatcgccctgagcctgggcctgacccccaacttcaagagcaacttcgacctggccgaggacgccaagctgcagctgagcaaggacacctacgacgacgacctggacaacctgctggcccagatcggcgaccagtacgccgacctgttcctggccgccaagaacctgagcgacgccatcctgctgagcgacatcctgcgggtgaacaccgagatcaccaaggcccccctgagcgccagcatgatcaagcggtacgacgagcaccaccaggacctgaccctgctgaaggccctggtgcggcagcagctgcccgagaagtacaaggagatcttcttcgaccagagcaagaacggctacgccggctacatcgacggcggcgccagccaggaggagttctacaagttcatcaagcccatcctggagaagatggacggcaccgaggagctgctggtgaagctgaaccgggaggacctgctgcggaagcagcggaccttcgacaacggcagcatcccccaccagatccacctgggcgagctgcacgccatcctgcggcggcaggaggacttctaccccttcctgaaggacaaccgggagaagatcgagaagatcctgaccttccggatcccctactacgtgggccccctggcccggggcaacagccggttcgcctggatgacccggaagagcgaggagaccatcaccccctggaacttcgaggaggtggtggacaagggcgccagcgcccagagcttcatcgagcggatgaccaacttcgacaagaacctgcccaacgagaaggtgctgcccaagcacagcctgctgtacgagtacttcaccgtgtacaacgagctgaccaaggtgaagtacgtgaccgagggcatgcggaagcccgccttcctgagcggcgagcagaagaaggccatcgtggacctgctgttcaagaccaaccggaaggtgaccgtgaagcagctgaaggaggactacttcaagaagatcgagtgcttcgacagcgtggagatcagcggcgtggaggaccggttcaacgccagcctgggcacctaccacgacctgctgaagatcatcaaggacaaggacttcctggacaacgaggagaacgaggacatcctggaggacatcgtgctgaccctgaccctgttcgaggaccgggagatgatcgaggagcggctgaagacctacgcccacctgttcgacgacaaggtgatgaagcagctgaagcggcggcggtacaccggctggggccggctgagccggaagctgatcaacggcatccgggacaagcagagcggcaagaccatcctggacttcctgaagagcgacggcttcgccaaccggaacttcatgcagctgatccacgacgacagcctgaccttcaaggaggacatccagaaggcccaggtgagcggccagggcgacagcctgcacgagcacatcgccaacctggccggcagccccgccatcaagaagggcatcctgcagaccgtgaaggtggtggacgagctggtgaaggtgatgggccggcacaagcccgagaacatcgtgatcgagatggcccgggagaaccagaccacccagaagggccagaagaacagccgggagcggatgaagcggatcgaggagggcatcaaggagctgggcagccagatcctgaaggagcaccccgtggagaacacccagctgcagaacgagaagctgtacctgtactacctgcagaacggccgggacatgtacgtggaccaggagctggacatcaaccggctgagcgactacgacgtggaccacatcgtgccccagagcttcctgaaggacgacagcatcgacaacaaggtgctgacccggagcgacaagaaccggggcaagagcgacaacgtgcccagcgaggaggtggtgaagaagatgaagaactactggcggcagctgctgaacgccaagctgatcacccagcggaagttcgacaacctgaccaaggccgagcggggcggcctgagcgagctggacaaggccggcttcatcaagcggcagctggtggagacccggcagatcaccaagcacgtggcccagatcctggacagccggatgaacaccaagtacgacgagaacgacaagctgatccgggaggtgaaggtgatcaccctgaagagcaagctggtgagcgacttccggaaggacttccagttctacaaggtgcgggagatcaacaactaccaccacgcccacgacgcctacctgaacgccgtggtgggcaccgccctgatcaagaagtaccccaagctggagagcgagttcgtgtacggcgactacaaggtgtacgacgtgcggaagatgatcgccaagagcgagcaggagatcggcaaggccaccgccaagtacttcttctacagcaacatcatgaacttcttcaagaccgagatcaccctggccaacggcgagatccggaagcggcccctgatcgagaccaacggcgagaccggcgagatcgtgtgggacaagggccgggacttcgccaccgtgcggaaggtgctgagcatgccccaggtgaacatcgtgaagaagaccgaggtgcagaccggcggcttcagcaaggagagcatcctgcccaagcggaacagcgacaagctgatcgcccggaagaaggactgggaccccaagaagtacggcggcttcgacagccccaccgtggcctacagcgtgctggtggtggccaaggtggagaagggcaagagcaagaagctgaagagcgtgaaggagctgctgggcatcaccatcatggagcggagcagcttcgagaagaaccccatcgacttcctggaggccaagggctacaaggaggtgaagaaggacctgatcatcaagctgcccaagtacagcctgttcgagctggagaacggccggaagcggatgctggccagcgccggcgagctgcagaagggcaacgagctggccctgcccagcaagtacgtgaacttcctgtacctggccagccactacgagaagctgaagggcagccccgaggacaacgagcagaagcagctgttcgtggagcagcacaagcactacctggacgagatcatcgagcagatcagcgagttcagcaagcgggtgatcctggccgacgccaacctggacaaggtgctgagcgcctacaacaagcaccgggacaagcccatccgggagcaggccgagaacatcatccacctgttcaccctgaccaacctgggcgcccccgccgccttcaagtacttcgacaccaccatcgaccggaagcggtacaccagcaccaaggaggtgctggacgccaccctgatccaccagagcatcaccggcctgtacgagacccggatcgacctgagccagctgggcggcgacggcagcggcagccccaagaagaagcggaaggtggacggcagccccaagaagaagcggaaggtggacagcggctga

SEQ ID NO: 3540 - DNA, 4107 bp, Artificial Sequence
  Synthetic
atggacaagaagtacagcatcggcctggacatcggcaccaacagcgtgggctgggccgtgatcaccgacgagtacaaggtgcccagcaagaagttcaaggtgctgggcaacaccgaccggcacagcatcaagaagaacctgatcggcgccctgctgttcgacagcggcgagaccgccgaggccacccggctgaagcggaccgcccggcggcggtacacccggcggaagaaccggatctgctacctgcaggagatcttcagcaacgagatggccaaggtggacgacagcttcttccaccggctggaggagagcttcctggtggaggaggacaagaagcacgagcggcaccccatcttcggcaacatcgtggacgaggtggcctaccacgagaagtaccccaccatctaccacctgcggaagaagctggtggacagcaccgacaaggccgacctgcggctgatctacctggccctggcccacatgatcaagttccggggccacttcctgatcgagggcgacctgaaccccgacaacagcgacgtggacaagctgttcatccagctggtgcagacctacaaccagctgttcgaggagaaccccatcaacgccagcggcgtggacgccaaggccatcctgagcgcccggctgagcaagagccggcggctggagaacctgatcgcccagctgcccggcgagaagaagaacggcctgttcggcaacctgatcgccctgagcctgggcctgacccccaacttcaagagcaacttcgacctggccgaggacgccaagctgcagctgagcaaggacacctacgacgacgacctggacaacctgctggcccagatcggcgaccagtacgccgacctgttcctggccgccaagaacctgagcgacgccatcctgctgagcgacatcctgcgggtgaacaccgagatcaccaaggcccccctgagcgccagcatgatcaagcggtacgacgagcaccaccaggacctgaccctgctgaaggccctggtgcggcagcagctgcccgagaagtacaaggagatcttcttcgaccagagcaagaacggctacgccggctacatcgacggcggcgccagccaggaggagttctacaagttcatcaagcccatcctggagaagatggacggcaccgaggagctgctggtgaagctgaaccgggaggacctgctgcggaagcagcggaccttcgacaacggcagcatcccccaccagatccacctgggcgagctgcacgccatcctgcggcggcaggaggacttctaccccttcctgaaggacaaccgggagaagatcgagaagatcctgaccttccggatcccctactacgtgggccccctggcccggggcaacagccggttcgcctggatgacccggaagagcgaggagaccatcaccccctggaacttcgaggaggtggtggacaagggcgccagcgcccagagcttcatcgagcggatgaccaacttcgacaagaacctgcccaacgagaaggtgctgcccaagcacagcctgctgtacgagtacttcaccgtgtacaacgagctgaccaaggtgaagtacgtgaccgagggcatgcggaagcccgccttcctgagcggcgagcagaagaaggccatcgtggacctgctgttcaagaccaaccggaaggtgaccgtgaagcagctgaaggaggactacttcaagaagatcgagtgcttcgacagcgtggagatcagcggcgtggaggaccggttcaacgccagcctgggcacctaccacgacctgctgaagatcatcaaggacaaggacttcctggacaacgaggagaacgaggacatcctggaggacatcgtgctgaccctgaccctgttcgaggaccgggagatgatcgaggagcggctgaagacctacgcccacctgttcgacgacaaggtgatgaagcagctgaagcggcggcggtacaccggctggggccggctgagccggaagctgatcaacggcatccgggacaagcagagcggcaagaccatcctggacttcctgaagagcgacggcttcgccaaccggaacttcatgcagctgatccacgacgacagcctgaccttcaaggaggacatccagaaggcccaggtgagcggccagggcgacagcctgcacgagcacatcgccaacctggccggcagccccgccatcaagaagggcatcctgcagaccgtgaaggtggtggacgagctggtgaaggtgatgggccggcacaagcccgagaacatcgtgatcgagatggcccgggagaaccagaccacccagaagggccagaagaacagccgggagcggatgaagcggatcgaggagggcatcaaggagctgggcagccagatcctgaaggagcaccccgtggagaacacccagctgcagaacgagaagctgtacctgtactacctgcagaacggccgggacatgtacgtggaccaggagctggacatcaaccggctgagcgactacgacgtggaccacatcgtgccccagagcttcctgaaggacgacagcatcgacaacaaggtgctgacccggagcgacaagaaccggggcaagagcgacaacgtgcccagcgaggaggtggtgaagaagatgaagaactactggcggcagctgctgaacgccaagctgatcacccagcggaagttcgacaacctgaccaaggccgagcggggcggcctgagcgagctggacaaggccggcttcatcaagcggcagctggtggagacccggcagatcaccaagcacgtggcccagatcctggacagccggatgaacaccaagtacgacgagaacgacaagctgatccgggaggtgaaggtgatcaccctgaagagcaagctggtgagcgacttccggaaggacttccagttctacaaggtgcgggagatcaacaactaccaccacgcccacgacgcctacctgaacgccgtggtgggcaccgccctgatcaagaagtaccccaagctggagagcgagttcgtgtacggcgactacaaggtgtacgacgtgcggaagatgatcgccaagagcgagcaggagatcggcaaggccaccgccaagtacttcttctacagcaacatcatgaacttcttcaagaccgagatcaccctggccaacggcgagatccggaagcggcccctgatcgagaccaacggcgagaccggcgagatcgtgtgggacaagggccgggacttcgccaccgtgcggaaggtgctgagcatgccccaggtgaacatcgtgaagaagaccgaggtgcagaccggcggcttcagcaaggagagcatcctgcccaagcggaacagcgacaagctgatcgcccggaagaaggactgggaccccaagaagtacggcggcttcgacagccccaccgtggcctacagcgtgctggtggtggccaaggtggagaagggcaagagcaagaagctgaagagcgtgaaggagctgctgggcatcaccatcatggagcggagcagcttcgagaagaaccccatcgacttcctggaggccaagggctacaaggaggtgaagaaggacctgatcatcaagctgcccaagtacagcctgttcgagctggagaacggccggaagcggatgctggccagcgccggcgagctgcagaagggcaacgagctggccctgcccagcaagtacgtgaacttcctgtacctggccagccactacgagaagctgaagggcagccccgaggacaacgagcagaagcagctgttcgtggagcagcacaagcactacctggacgagatcatcgagcagatcagcgagttcagcaagcgggtgatcctggccgacgccaacctggacaaggtgctgagcgcctacaacaagcaccgggacaagcccatccgggagcaggccgagaacatcatccacctgttcaccctgaccaacctgggcgcccccgccgccttcaagtacttcgacaccaccatcgaccggaagcggtacaccagcaccaaggaggtgctggacgccaccctgatccaccagagcatcaccggcctgtacgagacccggatcgacctgagccagctgggcggcgactga

SEQ ID NO: 3541 - DNA, 4140 bp, Artificial Sequence
  Synthetic
atggacaagaagtacagcatcggcctggccatcggcaccaacagcgtgggctgggccgtgatcaccgacgagtacaaggtgcccagcaagaagttcaaggtgctgggcaacaccgaccggcacagcatcaagaagaacctgatcggcgccctgctgttcgacagcggcgagaccgccgaggccacccggctgaagcggaccgcccggcggcggtacacccggcggaagaaccggatctgctacctgcaggagatcttcagcaacgagatggccaaggtggacgacagcttcttccaccggctggaggagagcttcctggtggaggaggacaagaagcacgagcggcaccccatcttcggcaacatcgtggacgaggtggcctaccacgagaagtaccccaccatctaccacctgcggaagaagctggtggacagcaccgacaaggccgacctgcggctgatctacctggccctggcccacatgatcaagttccggggccacttcctgatcgagggcgacctgaaccccgacaacagcgacgtggacaagctgttcatccagctggtgcagacctacaaccagctgttcgaggagaaccccatcaacgccagcggcgtggacgccaaggccatcctgagcgcccggctgagcaagagccggcggctggagaacctgatcgcccagctgcccggcgagaagaagaacggcctgttcggcaacctgatcgccctgagcctgggcctgacccccaacttcaagagcaacttcgacctggccgaggacgccaagctgcagctgagcaaggacacctacgacgacgacctggacaacctgctggcccagatcggcgaccagtacgccgacctgttcctggccgccaagaacctgagcgacgccatcctgctgagcgacatcctgcgggtgaacaccgagatcaccaaggcccccctgagcgccagcatgatcaagcggtacgacgagcaccaccaggacctgaccctgctgaaggccctggtgcggcagcagctgcccgagaagtacaaggagatcttcttcgaccagagcaagaacggctacgccggctacatcgacggcggcgccagccaggaggagttctacaagttcatcaagcccatcctggagaagatggacggcaccgaggagctgctggtgaagctgaaccgggaggacctgctgcggaagcagcggaccttcgacaacggcagcatcccccaccagatccacctgggcgagctgcacgccatcctgcggcggcaggaggacttctaccccttcctgaaggacaaccgggagaagatcgagaagatcctgaccttccggatcccctactacgtgggccccctggcccggggcaacagccggttcgcctggatgacccggaagagcgaggagaccatcaccccctggaacttcgaggaggtggtggacaagggcgccagcgcccagagcttcatcgagcggatgaccaacttcgacaagaacctgcccaacgagaaggtgctgcccaagcacagcctgctgtacgagtacttcaccgtgtacaacgagctgaccaaggtgaagtacgtgaccgagggcatgcggaagcccgccttcctgagcggcgagcagaagaaggccatcgtggacctgctgttcaagaccaaccggaaggtgaccgtgaagcagctgaaggaggactacttcaagaagatcgagtgcttcgacagcgtggagatcagcggcgtggaggaccggttcaacgccagcctgggcacctaccacgacctgctgaagatcatcaaggacaaggacttcctggacaacgaggagaacgaggacatcctggaggacatcgtgctgaccctgaccctgttcgaggaccgggagatgatcgaggagcggctgaagacctacgcccacctgttcgacgacaaggtgatgaagcagctgaagcggcggcggtacaccggctggggccggctgagccggaagctgatcaacggcatccgggacaagcagagcggcaagaccatcctggacttcctgaagagcgacggcttcgccaaccggaacttcatgcagctgatccacgacgacagcctgaccttcaaggaggacatccagaaggcccaggtgagcggccagggcgacagcctgcacgagcacatcgccaacctggccggcagccccgccatcaagaagggcatcctgcagaccgtgaaggtggtggacgagctggtgaaggtgatgggccggcacaagcccgagaacatcgtgatcgagatggcccgggagaaccagaccacccagaagggccagaagaacagccgggagcggatgaagcggatcgaggagggcatcaaggagctgggcagccagatcctgaaggagcaccccgtggagaacacccagctgcagaacgagaagctgtacctgtactacctgcagaacggccgggacatgtacgtggaccaggagctggacatcaaccggctgagcgactacgacgtggaccacatcgtgccccagagcttcctgaaggacgacagcatcgacaacaaggtgctgacccggagcgacaagaaccggggcaagagcgacaacgtgcccagcgaggaggtggtgaagaagatgaagaactactggcggcagctgctgaacgccaagctgatcacccagcggaagttcgacaacctgaccaaggccgagcggggcggcctgagcgagctggacaaggccggcttcatcaagcggcagctggtggagacccggcagatcaccaagcacgtggcccagatcctggacagccggatgaacaccaagtacgacgagaacgacaagctgatccgggaggtgaaggtgatcaccctgaagagcaagctggtgagcgacttccggaaggacttccagttctacaaggtgcgggagatcaacaactaccaccacgcccacgacgcctacctgaacgccgtggtgggcaccgccctgatcaagaagtaccccaagctggagagcgagttcgtgtacggcgactacaaggtgtacgacgtgcggaagatgatcgccaagagcgagcaggagatcggcaaggccaccgccaagtacttcttctacagcaacatcatgaacttcttcaagaccgagatcaccctggccaacggcgagatccggaagcggcccctgatcgagaccaacggcgagaccggcgagatcgtgtgggacaagggccgggacttcgccaccgtgcggaaggtgctgagcatgccccaggtgaacatcgtgaagaagaccgaggtgcagaccggcggcttcagcaaggagagcatcctgcccaagcggaacagcgacaagctgatcgcccggaagaaggactgggaccccaagaagtacggcggcttcgacagccccaccgtggcctacagcgtgctggtggtggccaaggtggagaagggcaagagcaagaagctgaagagcgtgaaggagctgctgggcatcaccatcatggagcggagcagcttcgagaagaaccccatcgacttcctggaggccaagggctacaaggaggtgaagaaggacctgatcatcaagctgcccaagtacagcctgttcgagctggagaacggccggaagcggatgctggccagcgccggcgagctgcagaagggcaacgagctggccctgcccagcaagtacgtgaacttcctgtacctggccagccactacgagaagctgaagggcagccccgaggacaacgagcagaagcagctgttcgtggagcagcacaagcactacctggacgagatcatcgagcagatcagcgagttcagcaagcgggtgatcctggccgacgccaacctggacaaggtgctgagcgcctacaacaagcaccgggacaagcccatccgggagcaggccgagaacatcatccacctgttcaccctgaccaacctgggcgcccccgccgccttcaagtacttcgacaccaccatcgaccggaagcggtacaccagcaccaaggaggtgctggacgccaccctgatccaccagagcatcaccggcctgtacgagacccggatcgacctgagccagctgggcggcgacggcggcggcagccccaagaagaagcggaaggtgtga

SEQ ID NO: 3542 - DNA, 4179 bp, Artificial Sequence
  Synthetic
atggacaagaagtacagcatcggcctggccatcggcaccaacagcgtgggctgggccgtgatcaccgacgagtacaaggtgcccagcaagaagttcaaggtgctgggcaacaccgaccggcacagcatcaagaagaacctgatcggcgccctgctgttcgacagcggcgagaccgccgaggccacccggctgaagcggaccgcccggcggcggtacacccggcggaagaaccggatctgctacctgcaggagatcttcagcaacgagatggccaaggtggacgacagcttcttccaccggctggaggagagcttcctggtggaggaggacaagaagcacgagcggcaccccatcttcggcaacatcgtggacgaggtggcctaccacgagaagtaccccaccatctaccacctgcggaagaagctggtggacagcaccgacaaggccgacctgcggctgatctacctggccctggcccacatgatcaagttccggggccacttcctgatcgagggcgacctgaaccccgacaacagcgacgtggacaagctgttcatccagctggtgcagacctacaaccagctgttcgaggagaaccccatcaacgccagcggcgtggacgccaaggccatcctgagcgcccggctgagcaagagccggcggctggagaacctgatcgcccagctgcccggcgagaagaagaacggcctgttcggcaacctgatcgccctgagcctgggcctgacccccaacttcaagagcaacttcgacctggccgaggacgccaagctgcagctgagcaaggacacctacgacgacgacctggacaacctgctggcccagatcggcgaccagtacgccgacctgttcctggccgccaagaacctgagcgacgccatcctgctgagcgacatcctgcgggtgaacaccgagatcaccaaggcccccctgagcgccagcatgatcaagcggtacgacgagcaccaccaggacctgaccctgctgaaggccctggtgcggcagcagctgcccgagaagtacaaggagatcttcttcgaccagagcaagaacggctacgccggctacatcgacggcggcgccagccaggaggagttctacaagttcatcaagcccatcctggagaagatggacggcaccgaggagctgctggtgaagctgaaccgggaggacctgctgcggaagcagcggaccttcgacaacggcagcatcccccaccagatccacctgggcgagctgcacgccatcctgcggcggcaggaggacttctaccccttcctgaaggacaaccgggagaagatcgagaagatcctgaccttccggatcccctactacgtgggccccctggcccggggcaacagccggttcgcctggatgacccggaagagcgaggagaccatcaccccctggaacttcgaggaggtggtggacaagggcgccagcgcccagagcttcatcgagcggatgaccaacttcgacaagaacctgcccaacgagaaggtgctgcccaagcacagcctgctgtacgagtacttcaccgtgtacaacgagctgaccaaggtgaagtacgtgaccgagggcatgcggaagcccgccttcctgagcggcgagcagaagaaggccatcgtggacctgctgttcaagaccaaccggaaggtgaccgtgaagcagctgaaggaggactacttcaagaagatcgagtgcttcgacagcgtggagatcagcggcgtggaggaccggttcaacgccagcctgggcacctaccacgacctgctgaagatcatcaaggacaaggacttcctggacaacgaggagaacgaggacatcctggaggacatcgtgctgaccctgaccctgttcgaggaccgggagatgatcgaggagcggctgaagacctacgcccacctgttcgacgacaaggtgatgaagcagctgaagcggcggcggtacaccggctggggccggctgagccggaagctgatcaacggcatccgggacaagcagagcggcaagaccatcctggacttcctgaagagcgacggcttcgccaaccggaacttcatgcagctgatccacgacgacagcctgaccttcaaggaggacatccagaaggcccaggtgagcggccagggcgacagcctgcacgagcacatcgccaacctggccggcagccccgccatcaagaagggcatcctgcagaccgtgaaggtggtggacgagctggtgaaggtgatgggccggcacaagcccgagaacatcgtgatcgagatggcccgggagaaccagaccacccagaagggccagaagaacagccgggagcggatgaagcggatcgaggagggcatcaaggagctgggcagccagatcctgaaggagcaccccgtggagaacacccagctgcagaacgagaagctgtacctgtactacctgcagaacggccgggacatgtacgtggaccaggagctggacatcaaccggctgagcgactacgacgtggaccacatcgtgccccagagcttcctgaaggacgacagcatcgacaacaaggtgctgacccggagcgacaagaaccggggcaagagcgacaacgtgcccagcgaggaggtggtgaagaagatgaagaactactggcggcagctgctgaacgccaagctgatcacccagcggaagttcgacaacctgaccaaggccgagcggggcggcctgagcgagctggacaaggccggcttcatcaagcggcagctggtggagacccggcagatcaccaagcacgtggcccagatcctggacagccggatgaacaccaagtacgacgagaacgacaagctgatccgggaggtgaaggtgatcaccctgaagagcaagctggtgagcgacttccggaaggacttccagttctacaaggtgcgggagatcaacaactaccaccacgcccacgacgcctacctgaacgccgtggtgggcaccgccctgatcaagaagtaccccaagctggagagcgagttcgtgtacggcgactacaaggtgtacgacgtgcggaagatgatcgccaagagcgagcaggagatcggcaaggccaccgccaagtacttcttctacagcaacatcatgaacttcttcaagaccgagatcaccctggccaacggcgagatccggaagcggcccctgatcgagaccaacggcgagaccggcgagatcgtgtgggacaagggccgggacttcgccaccgtgcggaaggtgctgagcatgccccaggtgaacatcgtgaagaagaccgaggtgcagaccggcggcttcagcaaggagagcatcctgcccaagcggaacagcgacaagctgatcgcccggaagaaggactgggaccccaagaagtacggcggcttcgacagccccaccgtggcctacagcgtgctggtggtggccaaggtggagaagggcaagagcaagaagctgaagagcgtgaaggagctgctgggcatcaccatcatggagcggagcagcttcgagaagaaccccatcgacttcctggaggccaagggctacaaggaggtgaagaaggacctgatcatcaagctgcccaagtacagcctgttcgagctggagaacggccggaagcggatgctggccagcgccggcgagctgcagaagggcaacgagctggccctgcccagcaagtacgtgaacttcctgtacctggccagccactacgagaagctgaagggcagccccgaggacaacgagcagaagcagctgttcgtggagcagcacaagcactacctggacgagatcatcgagcagatcagcgagttcagcaagcgggtgatcctggccgacgccaacctggacaaggtgctgagcgcctacaacaagcaccgggacaagcccatccgggagcaggccgagaacatcatccacctgttcaccctgaccaacctgggcgcccccgccgccttcaagtacttcgacaccaccatcgaccggaagcggtacaccagcaccaaggaggtgctggacgccaccctgatccaccagagcatcaccggcctgtacgagacccggatcgacctgagccagctgggcggcgacggcagcggcagccccaagaagaagcggaaggtggacggcagccccaagaagaagcggaaggtggacagcggctga

SEQ ID NO: 3543 - DNA, 4107 bp, Artificial Sequence
  Synthetic
atggacaagaagtacagcatcggcctggccatcggcaccaacagcgtgggctgggccgtgatcaccgacgagtacaaggtgcccagcaagaagttcaaggtgctgggcaacaccgaccggcacagcatcaagaagaacctgatcggcgccctgctgttcgacagcggcgagaccgccgaggccacccggctgaagcggaccgcccggcggcggtacacccggcggaagaaccggatctgctacctgcaggagatcttcagcaacgagatggccaaggtggacgacagcttcttccaccggctggaggagagcttcctggtggaggaggacaagaagcacgagcggcaccccatcttcggcaacatcgtggacgaggtggcctaccacgagaagtaccccaccatctaccacctgcggaagaagctggtggacagcaccgacaaggccgacctgcggctgatctacctggccctggcccacatgatcaagttccggggccacttcctgatcgagggcgacctgaaccccgacaacagcgacgtggacaagctgttcatccagctggtgcagacctacaaccagctgttcgaggagaaccccatcaacgccagcggcgtggacgccaaggccatcctgagcgcccggctgagcaagagccggcggctggagaacctgatcgcccagctgcccggcgagaagaagaacggcctgttcggcaacctgatcgccctgagcctgggcctgacccccaacttcaagagcaacttcgacctggccgaggacgccaagctgcagctgagcaaggacacctacgacgacgacctggacaacctgctggcccagatcggcgaccagtacgccgacctgttcctggccgccaagaacctgagcgacgccatcctgctgagcgacatcctgcgggtgaacaccgagatcaccaaggcccccctgagcgccagcatgatcaagcggtacgacgagcaccaccaggacctgaccctgctgaaggccctggtgcggcagcagctgcccgagaagtacaaggagatcttcttcgaccagagcaagaacggctacgccggctacatcgacggcggcgccagccaggaggagttctacaagttcatcaagcccatcctggagaagatggacggcaccgaggagctgctggtgaagctgaaccgggaggacctgctgcggaagcagcggaccttcgacaacggcagcatcccccaccagatccacctgggcgagctgcacgccatcctgcggcggcaggaggacttctaccccttcctgaaggacaaccgggagaagatcgagaagatcctgaccttccggatcccctactacgtgggccccctggcccggggcaacagccggttcgcctggatgacccggaagagcgaggagaccatcaccccctggaacttcgaggaggtggtggacaagggcgccagcgcccagagcttcatcgagcggatgaccaacttcgacaagaacctgcccaacgagaaggtgctgcccaagcacagcctgctgtacgagtacttcaccgtgtacaacgagctgaccaaggtgaagtacgtgaccgagggcatgcggaagcccgccttcctgagcggcgagcagaagaaggccatcgtggacctgctgttcaagaccaaccggaaggtgaccgtgaagcagctgaaggaggactacttcaagaagatcgagtgcttcgacagcgtggagatcagcggcgtggaggaccggttcaacgccagcctgggcacctaccacgacctgctgaagatcatcaaggacaaggacttcctggacaacgaggagaacgaggacatcctggaggacatcgtgctgaccctgaccctgttcgaggaccgggagatgatcgaggagcggctgaagacctacgcccacctgttcgacgacaaggtgatgaagcagctgaagcggcggcggtacaccggctggggccggctgagccggaagctgatcaacggcatccgggacaagcagagcggcaagaccatcctggacttcctgaagagcgacggcttcgccaaccggaacttcatgcagctgatccacgacgacagcctgaccttcaaggaggacatccagaaggcccaggtgagcggccagggcgacagcctgcacgagcacatcgccaacctggccggcagccccgccatcaagaagggcatcctgcagaccgtgaaggtggtggacgagctggtgaaggtgatgggccggcacaagcccgagaacatcgtgatcgagatggcccgggagaaccagaccacccagaagggccagaagaacagccgggagcggatgaagcggatcgaggagggcatcaaggagctgggcagccagatcctgaaggagcaccccgtggagaacacccagctgcagaacgagaagctgtacctgtactacctgcagaacggccgggacatgtacgtggaccaggagctggacatcaaccggctgagcgactacgacgtggaccacatcgtgccccagagcttcctgaaggacgacagcatcgacaacaaggtgctgacccggagcgacaagaaccggggcaagagcgacaacgtgcccagcgaggaggtggtgaagaagatgaagaactactggcggcagctgctgaacgccaagctgatcacccagcggaagttcgacaacctgaccaaggccgagcggggcggcctgagcgagctggacaaggccggcttcatcaagcggcagctggtggagacccggcagatcaccaagcacgtggcccagatcctggacagccggatgaacaccaagtacgacgagaacgacaagctgatccgggaggtgaaggtgatcaccctgaagagcaagctggtgagcgacttccggaaggacttccagttctacaaggtgcgggagatcaacaactaccaccacgcccacgacgcctacctgaacgccgtggtgggcaccgccctgatcaagaagtaccccaagctggagagcgagttcgtgtacggcgactacaaggtgtacgacgtgcggaagatgatcgccaagagcgagcaggagatcggcaaggccaccgccaagtacttcttctacagcaacatcatgaacttcttcaagaccgagatcaccctggccaacggcgagatccggaagcggcccctgatcgagaccaacggcgagaccggcgagatcgtgtgggacaagggccgggacttcgccaccgtgcggaaggtgctgagcatgccccaggtgaacatcgtgaagaagaccgaggtgcagaccggcggcttcagcaaggagagcatcctgcccaagcggaacagcgacaagctgatcgcccggaagaaggactgggaccccaagaagtacggcggcttcgacagccccaccgtggcctacagcgtgctggtggtggccaaggtggagaagggcaagagcaagaagctgaagagcgtgaaggagctgctgggcatcaccatcatggagcggagcagcttcgagaagaaccccatcgacttcctggaggccaagggctacaaggaggtgaagaaggacctgatcatcaagctgcccaagtacagcctgttcgagctggagaacggccggaagcggatgctggccagcgccggcgagctgcagaagggcaacgagctggccctgcccagcaagtacgtgaacttcctgtacctggccagccactacgagaagctgaagggcagccccgaggacaacgagcagaagcagctgttcgtggagcagcacaagcactacctggacgagatcatcgagcagatcagcgagttcagcaagcgggtgatcctggccgacgccaacctggacaaggtgctgagcgcctacaacaagcaccgggacaagcccatccgggagcaggccgagaacatcatccacctgttcaccctgaccaacctgggcgcccccgccgccttcaagtacttcgacaccaccatcgaccggaagcggtacaccagcaccaaggaggtgctggacgccaccctgatccaccagagcatcaccggcctgtacgagacccggatcgacctgagccagctgggcggcgactga

SEQ ID NO: 3544 - DNA, 4140 bp, Artificial Sequence
  Synthetic
atggacaagaagtacagcatcggcctggccatcggcaccaacagcgtgggctgggccgtgatcaccgacgagtacaaggtgcccagcaagaagttcaaggtgctgggcaacaccgaccggcacagcatcaagaagaacctgatcggcgccctgctgttcgacagcggcgagaccgccgaggccacccggctgaagcggaccgcccggcggcggtacacccggcggaagaaccggatctgctacctgcaggagatcttcagcaacgagatggccaaggtggacgacagcttcttccaccggctggaggagagcttcctggtggaggaggacaagaagcacgagcggcaccccatcttcggcaacatcgtggacgaggtggcctaccacgagaagtaccccaccatctaccacctgcggaagaagctggtggacagcaccgacaaggccgacctgcggctgatctacctggccctggcccacatgatcaagttccggggccacttcctgatcgagggcgacctgaaccccgacaacagcgacgtggacaagctgttcatccagctggtgcagacctacaaccagctgttcgaggagaaccccatcaacgccagcggcgtggacgccaaggccatcctgagcgcccggctgagcaagagccggcggctggagaacctgatcgcccagctgcccggcgagaagaagaacggcctgttcggcaacctgatcgccctgagcctgggcctgacccccaacttcaagagcaacttcgacctggccgaggacgccaagctgcagctgagcaaggacacctacgacgacgacctggacaacctgctggcccagatcggcgaccagtacgccgacctgttcctggccgccaagaacctgagcgacgccatcctgctgagcgacatcctgcgggtgaacaccgagatcaccaaggcccccctgagcgccagcatgatcaagcggtacgacgagcaccaccaggacctgaccctgctgaaggccctggtgcggcagcagctgcccgagaagtacaaggagatcttcttcgaccagagcaagaacggctacgccggctacatcgacggcggcgccagccaggaggagttctacaagttcatcaagcccatcctggagaagatggacggcaccgaggagctgctggtgaagctgaaccgggaggacctgctgcggaagcagcggaccttcgacaacggcagcatcccccaccagatccacctgggcgagctgcacgccatcctgcggcggcaggaggacttctaccccttcctgaaggacaaccgggagaagatcgagaagatcctgaccttccggatcccctactacgtgggccccctggcccggggcaacagccggttcgcctggatgacccggaagagcgaggagaccatcaccccctggaacttcgaggaggtggtggacaagggcgccagcgcccagagcttcatcgagcggatgaccaacttcgacaagaacctgcccaacgagaaggtgctgcccaagcacagcctgctgtacgagtacttcaccgtgtacaacgagctgaccaaggtgaagtacgtgaccgagggcatgcggaagcccgccttcctgagcggcgagcagaagaaggccatcgtggacctgctgttcaagaccaaccggaaggtgaccgtgaagcagctgaaggaggactacttcaagaagatcgagtgcttcgacagcgtggagatcagcggcgtggaggaccggttcaacgccagcctgggcacctaccacgacctgctgaagatcatcaaggacaaggacttcctggacaacgaggagaacgaggacatcctggaggacatcgtgctgaccctgaccctgttcgaggaccgggagatgatcgaggagcggctgaagacctacgcccacctgttcgacgacaaggtgatgaagcagctgaagcggcggcggtacaccggctggggccggctgagccggaagctgatcaacggcatccgggacaagcagagcggcaagaccatcctggacttcctgaagagcgacggcttcgccaaccggaacttcatgcagctgatccacgacgacagcctgaccttcaaggaggacatccagaaggcccaggtgagcggccagggcgacagcctgcacgagcacatcgccaacctggccggcagccccgccatcaagaagggcatcctgcagaccgtgaaggtggtggacgagctggtgaaggtgatgggccggcacaagcccgagaacatcgtgatcgagatggcccgggagaaccagaccacccagaagggccagaagaacagccgggagcggatgaagcggatcgaggagggcatcaaggagctgggcagccagatcctgaaggagcaccccgtggagaacacccagctgcagaacgagaagctgtacctgtactacctgcagaacggccgggacatgtacgtggaccaggagctggacatcaaccggctgagcgactacgacgtggacgccatcgtgccccagagcttcctgaaggacgacagcatcgacaacaaggtgctgacccggagcgacaagaaccggggcaagagcgacaacgtgcccagcgaggaggtggtgaagaagatgaagaactactggcggcagctgctgaacgccaagctgatcacccagcggaagttcgacaacctgaccaaggccgagcggggcggcctgagcgagctggacaaggccggcttcatcaagcggcagctggtggagacccggcagatcaccaagcacgtggcccagatcctggacagccggatgaacaccaagtacgacgagaacgacaagctgatccgggaggtgaaggtgatcaccctgaagagcaagctggtgagcgacttccggaaggacttccagttctacaaggtgcgggagatcaacaactaccaccacgcccacgacgcctacctgaacgccgtggtgggcaccgccctgatcaagaagtaccccaagctggagagcgagttcgtgtacggcgactacaaggtgtacgacgtgcggaagatgatcgccaagagcgagcaggagatcggcaaggccaccgccaagtacttcttctacagcaacatcatgaacttcttcaagaccgagatcaccctggccaacggcgagatccggaagcggcccctgatcgagaccaacggcgagaccggcgagatcgtgtgggacaagggccgggacttcgccaccgtgcggaaggtgctgagcatgccccaggtgaacatcgtgaagaagaccgaggtgcagaccggcggcttcagcaaggagagcatcctgcccaagcggaacagcgacaagctgatcgcccggaagaaggactgggaccccaagaagtacggcggcttcgacagccccaccgtggcctacagcgtgctggtggtggccaaggtggagaagggcaagagcaagaagctgaagagcgtgaaggagctgctgggcatcaccatcatggagcggagcagcttcgagaagaaccccatcgacttcctggaggccaagggctacaaggaggtgaagaaggacctgatcatcaagctgcccaagtacagcctgttcgagctggagaacggccggaagcggatgctggccagcgccggcgagctgcagaagggcaacgagctggccctgcccagcaagtacgtgaacttcctgtacctggccagccactacgagaagctgaagggcagccccgaggacaacgagcagaagcagctgttcgtggagcagcacaagcactacctggacgagatcatcgagcagatcagcgagttcagcaagcgggtgatcctggccgacgccaacctggacaaggtgctgagcgcctacaacaagcaccgggacaagcccatccgggagcaggccgagaacatcatccacctgttcaccctgaccaacctgggcgcccccgccgccttcaagtacttcgacaccaccatcgaccggaagcggtacaccagcaccaaggaggtgctggacgccaccctgatccaccagagcatcaccggcctgtacgagacccggatcgacctgagccagctgggcggcgacggcggcggcagccccaagaagaagcggaaggtgtga

SEQ ID NO: 3545 - DNA, 4179 bp, Artificial Sequence
  Synthetic
atggacaagaagtacagcatcggcctggccatcggcaccaacagcgtgggctgggccgtgatcaccgacgagtacaaggtgcccagcaagaagttcaaggtgctgggcaacaccgaccggcacagcatcaagaagaacctgatcggcgccctgctgttcgacagcggcgagaccgccgaggccacccggctgaagcggaccgcccggcggcggtacacccggcggaagaaccggatctgctacctgcaggagatcttcagcaacgagatggccaaggtggacgacagcttcttccaccggctggaggagagcttcctggtggaggaggacaagaagcacgagcggcaccccatcttcggcaacatcgtggacgaggtggcctaccacgagaagtaccccaccatctaccacctgcggaagaagctggtggacagcaccgacaaggccgacctgcggctgatctacctggccctggcccacatgatcaagttccggggccacttcctgatcgagggcgacctgaaccccgacaacagcgacgtggacaagctgttcatccagctggtgcagacctacaaccagctgttcgaggagaaccccatcaacgccagcggcgtggacgccaaggccatcctgagcgcccggctgagcaagagccggcggctggagaacctgatcgcccagctgcccggcgagaagaagaacggcctgttcggcaacctgatcgccctgagcctgggcctgacccccaacttcaagagcaacttcgacctggccgaggacgccaagctgcagctgagcaaggacacctacgacgacgacctggacaacctgctggcccagatcggcgaccagtacgccgacctgttcctggccgccaagaacctgagcgacgccatcctgctgagcgacatcctgcgggtgaacaccgagatcaccaaggcccccctgagcgccagcatgatcaagcggtacgacgagcaccaccaggacctgaccctgctgaaggccctggtgcggcagcagctgcccgagaagtacaaggagatcttcttcgaccagagcaagaacggctacgccggctacatcgacggcggcgccagccaggaggagttctacaagttcatcaagcccatcctggagaagatggacggcaccgaggagctgctggtgaagctgaaccgggaggacctgctgcggaagcagcggaccttcgacaacggcagcatcccccaccagatccacctgggcgagctgcacgccatcctgcggcggcaggaggacttctaccccttcctgaaggacaaccgggagaagatcgagaagatcctgaccttccggatcccctactacgtgggccccctggcccggggcaacagccggttcgcctggatgacccggaagagcgaggagaccatcaccccctggaacttcgaggaggtggtggacaagggcgccagcgcccagagcttcatcgagcggatgaccaacttcgacaagaacctgcccaacgagaaggtgctgcccaagcacagcctgctgtacgagtacttcaccgtgtacaacgagctgaccaaggtgaagtacgtgaccgagggcatgcggaagcccgccttcctgagcggcgagcagaagaaggccatcgtggacctgctgttcaagaccaaccggaaggtgaccgtgaagcagctgaaggaggactacttcaagaagatcgagtgcttcgacagcgtggagatcagcggcgtggaggaccggttcaacgccagcctgggcacctaccacgacctgctgaagatcatcaaggacaaggacttcctggacaacgaggagaacgaggacatcctggaggacatcgtgctgaccctgaccctgttcgaggaccgggagatgatcgaggagcggctgaagacctacgcccacctgttcgacgacaaggtgatgaagcagctgaagcggcggcggtacaccggctggggccggctgagccggaagctgatcaacggcatccgggacaagcagagcggcaagaccatcctggacttcctgaagagcgacggcttcgccaaccggaacttcatgcagctgatccacgacgacagcctgaccttcaaggaggacatccagaaggcccaggtgagcggccagggcgacagcctgcacgagcacatcgccaacctggccggcagccccgccatcaagaagggcatcctgcagaccgtgaaggtggtggacgagctggtgaaggtgatgggccggcacaagcccgagaacatcgtgatcgagatggcccgggagaaccagaccacccagaagggccagaagaacagccgggagcggatgaagcggatcgaggagggcatcaaggagctgggcagccagatcctgaaggagcaccccgtggagaacacccagctgcagaacgagaagctgtacctgtactacctgcagaacggccgggacatgtacgtggaccaggagctggacatcaaccggctgagcgactacgacgtggacgccatcgtgccccagagcttcctgaaggacgacagcatcgacaacaaggtgctgacccggagcgacaagaaccggggcaagagcgacaacgtgcccagcgaggaggtggtgaagaagatgaagaactactggcggcagctgctgaacgccaagctgatcacccagcggaagttcgacaacctgaccaaggccgagcggggcggcctgagcgagctggacaaggccggcttcatcaagcggcagctggtggagacccggcagatcaccaagcacgtggcccagatcctggacagccggatgaacaccaagtacgacgagaacgacaagctgatccgggaggtgaaggtgatcaccctgaagagcaagctggtgagcgacttccggaaggacttccagttctacaaggtgcgggagatcaacaactaccaccacgcccacgacgcctacctgaacgccgtggtgggcaccgccctgatcaagaagtaccccaagctggagagcgagttcgtgtacggcgactacaaggtgtacgacgtgcggaagatgatcgccaagagcgagcaggagatcggcaaggccaccgccaagtacttcttctacagcaacatcatgaacttcttcaagaccgagatcaccctggccaacggcgagatccggaagcggcccctgatcgagaccaacggcgagaccggcgagatcgtgtgggacaagggccgggacttcgccaccgtgcggaaggtgctgagcatgccccaggtgaacatcgtgaagaagaccgaggtgcagaccggcggcttcagcaaggagagcatcctgcccaagcggaacagcgacaagctgatcgcccggaagaaggactgggaccccaagaagtacggcggcttcgacagccccaccgtggcctacagcgtgctggtggtggccaaggtggagaagggcaagagcaagaagctgaagagcgtgaaggagctgctgggcatcaccatcatggagcggagcagcttcgagaagaaccccatcgacttcctggaggccaagggctacaaggaggtgaagaaggacctgatcatcaagctgcccaagtacagcctgttcgagctggagaacggccggaagcggatgctggccagcgccggcgagctgcagaagggcaacgagctggccctgcccagcaagtacgtgaacttcctgtacctggccagccactacgagaagctgaagggcagccccgaggacaacgagcagaagcagctgttcgtggagcagcacaagcactacctggacgagatcatcgagcagatcagcgagttcagcaagcgggtgatcctggccgacgccaacctggacaaggtgctgagcgcctacaacaagcaccgggacaagcccatccgggagcaggccgagaacatcatccacctgttcaccctgaccaacctgggcgcccccgccgccttcaagtacttcgacaccaccatcgaccggaagcggtacaccagcaccaaggaggtgctggacgccaccctgatccaccagagcatcaccggcctgtacgagacccggatcgacctgagccagctgggcggcgacggcagcggcagccccaagaagaagcggaaggtggacggcagccccaagaagaagcggaaggtggacagcggctga

SEQ ID NO: 3546 - DNA, 4107 bp, Artificial Sequence
  Synthetic
atggacaagaagtacagcatcggcctggccatcggcaccaacagcgtgggctgggccgtgatcaccgacgagtacaaggtgcccagcaagaagttcaaggtgctgggcaacaccgaccggcacagcatcaagaagaacctgatcggcgccctgctgttcgacagcggcgagaccgccgaggccacccggctgaagcggaccgcccggcggcggtacacccggcggaagaaccggatctgctacctgcaggagatcttcagcaacgagatggccaaggtggacgacagcttcttccaccggctggaggagagcttcctggtggaggaggacaagaagcacgagcggcaccccatcttcggcaacatcgtggacgaggtggcctaccacgagaagtaccccaccatctaccacctgcggaagaagctggtggacagcaccgacaaggccgacctgcggctgatctacctggccctggcccacatgatcaagttccggggccacttcctgatcgagggcgacctgaaccccgacaacagcgacgtggacaagctgttcatccagctggtgcagacctacaaccagctgttcgaggagaaccccatcaacgccagcggcgtggacgccaaggccatcctgagcgcccggctgagcaagagccggcggctggagaacctgatcgcccagctgcccggcgagaagaagaacggcctgttcggcaacctgatcgccctgagcctgggcctgacccccaacttcaagagcaacttcgacctggccgaggacgccaagctgcagctgagcaaggacacctacgacgacgacctggacaacctgctggcccagatcggcgaccagtacgccgacctgttcctggccgccaagaacctgagcgacgccatcctgctgagcgacatcctgcgggtgaacaccgagatcaccaaggcccccctgagcgccagcatgatcaagcggtacgacgagcaccaccaggacctgaccctgctgaaggccctggtgcggcagcagctgcccgagaagtacaaggagatcttcttcgaccagagcaagaacggctacgccggctacatcgacggcggcgccagccaggaggagttctacaagttcatcaagcccatcctggagaagatggacggcaccgaggagctgctggtgaagctgaaccgggaggacctgctgcggaagcagcggaccttcgacaacggcagcatcccccaccagatccacctgggcgagctgcacgccatcctgcggcggcaggaggacttctaccccttcctgaaggacaaccgggagaagatcgagaagatcctgaccttccggatcccctactacgtgggccccctggcccggggcaacagccggttcgcctggatgacccggaagagcgaggagaccatcaccccctggaacttcgaggaggtggtggacaagggcgccagcgcccagagcttcatcgagcggatgaccaacttcgacaagaacctgcccaacgagaaggtgctgcccaagcacagcctgctgtacgagtacttcaccgtgtacaacgagctgaccaaggtgaagtacgtgaccgagggcatgcggaagcccgccttcctgagcggcgagcagaagaaggccatcgtggacctgctgttcaagaccaaccggaaggtgaccgtgaagcagctgaaggaggactacttcaagaagatcgagtgcttcgacagcgtggagatcagcggcgtggaggaccggttcaacgccagcctgggcacctaccacgacctgctgaagatcatcaaggacaaggacttcctggacaacgaggagaacgaggacatcctggaggacatcgtgctgaccctgaccctgttcgaggaccgggagatgatcgaggagcggctgaagacctacgcccacctgttcgacgacaaggtgatgaagcagctgaagcggcggcggtacaccggctggggccggctgagccggaagctgatcaacggcatccgggacaagcagagcggcaagaccatcctggacttcctgaagagcgacggcttcgccaaccggaacttcatgcagctgatccacgacgacagcctgaccttcaaggaggacatccagaaggcccaggtgagcggccagggcgacagcctgcacgagcacatcgccaacctggccggcagccccgccatcaagaagggcatcctgcagaccgtgaaggtggtggacgagctggtgaaggtgatgggccggcacaagcccgagaacatcgtgatcgagatggcccgggagaaccagaccacccagaagggccagaagaacagccgggagcggatgaagcggatcgaggagggcatcaaggagctgggcagccagatcctgaaggagcaccccgtggagaacacccagctgcagaacgagaagctgtacctgtactacctgcagaacggccgggacatgtacgtggaccaggagctggacatcaaccggctgagcgactacgacgtggacgccatcgtgccccagagcttcctgaaggacgacagcatcgacaacaaggtgctgacccggagcgacaagaaccggggcaagagcgacaacgtgcccagcgaggaggtggtgaagaagatgaagaactactggcggcagctgctgaacgccaagctgatcacccagcggaagttcgacaacctgaccaaggccgagcggggcggcctgagcgagctggacaaggccggcttcatcaagcggcagctggtggagacccggcagatcaccaagcacgtggcccagatcctggacagccggatgaacaccaagtacgacgagaacgacaagctgatccgggaggtgaaggtgatcaccctgaagagcaagctggtgagcgacttccggaaggacttccagttctacaaggtgcgggagatcaacaactaccaccacgcccacgacgcctacctgaacgccgtggtgggcaccgccctgatcaagaagtaccccaagctggagagcgagttcgtgtacggcgactacaaggtgtacgacgtgcggaagatgatcgccaagagcgagcaggagatcggcaaggccaccgccaagtacttcttctacagcaacatcatgaacttcttcaagaccgagatcaccctggccaacggcgagatccggaagcggcccctgatcgagaccaacggcgagaccggcgagatcgtgtgggacaagggccgggacttcgccaccgtgcggaaggtgctgagcatgccccaggtgaacatcgtgaagaagaccgaggtgcagaccggcggcttcagcaaggagagcatcctgcccaagcggaacagcgacaagctgatcgcccggaagaaggactgggaccccaagaagtacggcggcttcgacagccccaccgtggcctacagcgtgctggtggtggccaaggtggagaagggcaagagcaagaagctgaagagcgtgaaggagctgctgggcatcaccatcatggagcggagcagcttcgagaagaaccccatcgacttcctggaggccaagggctacaaggaggtgaagaaggacctgatcatcaagctgcccaagtacagcctgttcgagctggagaacggccggaagcggatgctggccagcgccggcgagctgcagaagggcaacgagctggccctgcccagcaagtacgtgaacttcctgtacctggccagccactacgagaagctgaagggcagccccgaggacaacgagcagaagcagctgttcgtggagcagcacaagcactacctggacgagatcatcgagcagatcagcgagttcagcaagcgggtgatcctggccgacgccaacctggacaaggtgctgagcgcctacaacaagcaccgggacaagcccatccgggagcaggccgagaacatcatccacctgttcaccctgaccaacctgggcgcccccgccgccttcaagtacttcgacaccaccatcgaccggaagcggtacaccagcaccaaggaggtgctggacgccaccctgatccaccagagcatcaccggcctgtacgagacccggatcgacctgagccagctgggcggcgactga

SEQ ID NO: 3547 - RNA, 42 nt, Artificial Sequence; identical to SEQ ID NO: 2453
  Synthetic

SEQ ID NO: 3548 - RNA, 42 nt, Artificial Sequence; identical to SEQ ID NO: 1888
  Synthetic

SEQ ID NO: 3549 - RNA, 42 nt, Artificial Sequence; identical to SEQ ID NO: 2735
  Synthetic

SEQ ID NO: 3550 - RNA, 42 nt, Artificial Sequence; identical to SEQ ID NO: 2453
  Synthetic

SEQ ID NO: 3551 - RNA, 42 nt, Artificial Sequence; identical to SEQ ID NO: 1321
  Synthetic

SEQ ID NO: 3552 - RNA, 88 nt, Artificial Sequence; identical to SEQ ID NO: 44
  Synthetic

We claim:

1. A guide RNA (gRNA) which is a short-single guide RNA (short-sgRNA) comprising a conserved portion of an sgRNA comprising a hairpin region, wherein the hairpin region lacks at least 5-10 nucleotides and wherein the short-sgRNA comprises a 5′ end modification or a 3′ end modification.

2. The gRNA of claim 1, wherein the short-sgRNA comprises a 5′ end modification.

3. The gRNA of any one of the preceding claims, wherein the short-sgRNA comprises a 3′ end modification.

4. The gRNA of any one of the preceding claims, wherein the short-sgRNA comprises a 5′ end modification and a 3′ end modification.

5. The gRNA of any one of the preceding claims, wherein the short-sgRNA comprises a 3′ tail.

6. The gRNA of claim 5, wherein the 3′ tail comprises 1, 2, 3, 4, 5, 6, 7, 8, 9, or 10 nucleotides.

7. The gRNA of claim 5, wherein the 3′ tail comprises about 1-2, 1-3, 1-4, 1-5, 1-7, 1-10, at least 1-5, at least 1-3, at least 1-4, at least 1-5, at least 1-5, at least 1-7, or at least 1-10 nucleotides.

8. The gRNA of any one of the preceding claims, wherein the short-sgRNA does not comprise a 3′ tail.

9. The gRNA of any one of the preceding claims, comprising a modification in the hairpin region.

10. The gRNA of any one of the preceding claims, comprising a 3′ end modification, and a modification in the hairpin region.

11. The gRNA of any one of the preceding claims, comprising a 3′ end modification, a modification in the hairpin region, and a 5′ end modification.

12. The gRNA of any one of the preceding claims, comprising a 5′ end modification, and a modification in the hairpin region.

13. The gRNA of any one of the preceding claims, wherein the at least 5-10 lacking nucleotides are consecutive.

14. The gRNA of any one of the preceding claims, wherein the at least 5-10 lacking nucleotides:
i. are within hairpin 1;
ii. are within hairpin 1 and the “N” between hairpin 1 and hairpin 2;
iii. are within hairpin 1 and the two nucleotides immediately 3′ of hairpin 1;
iv. include at least a portion of hairpin 1;
v. are within hairpin 2;
vi. include at least a portion of hairpin 2;
vii. are within hairpin 1 and hairpin 2;
viii. include at least a portion of hairpin 1 and include the “N” between hairpin 1 and hairpin 2;
ix. include at least a portion of hairpin 2 and include the “N” between hairpin 1 and hairpin 2;
x. include at least a portion of hairpin 1, include the “N” between hairpin 1 and hairpin 2, and include at least a portion of hairpin 2;
xi. are within hairpin 1 or hairpin 2, optionally including the “N” between hairpin 1 and hairpin 2;
xii. are consecutive;
xiii. are consecutive and include the “N” between hairpin 1 and hairpin 2;
xiv. are consecutive and span at least a portion of hairpin 1 and a portion of hairpin 2;
xv. are consecutive and span at least a portion of hairpin 1 and the “N” between hairpin 1 and hairpin 2; or
xvi. are consecutive and span at least a portion of hairpin 1 and two nucleotides immediately 3′ of hairpin 1.

15. The gRNA of any one of the preceding claims, further comprising a guide region.

16. The gRNA of any one of the preceding claims, wherein the 3′ and/or 5′ end modification comprises a protective end modification, such as a modified nucleotide selected from 2′-O-methyl (2′-OMe) modified nucleotide, 2′-O-(2-methoxyethyl) (2′-O-moe) modified nucleotide, a 2′-fluoro (2′-F) modified nucleotide, a phosphorothioate (PS) linkage between nucleotides, an inverted abasic modified nucleotide, or combinations thereof.

17. The gRNA of any one of the preceding claims, wherein the modification in the hairpin region comprises a modified nucleotide selected from 2′-O-methyl (2′-OMe) modified nucleotide, a 2′-fluoro (2′-F) modified nucleotide, a phosphorothioate (PS) linkage between nucleotides, or combinations thereof.

18. The gRNA of any one of the preceding claims, wherein the 3′ and/or 5′ end modification comprises or further comprises a 2′-O-methyl (2′-OMe) modified nucleotide.

19. The gRNA of any one of the preceding claims, wherein the 3′ and/or 5′ end modification comprises or further comprises a 2′-fluoro (2′-F) modified nucleotide.

20. The gRNA of any one of the preceding claims, wherein the 3′ and/or 5′ end modification comprises or further comprises a phosphorothioate (PS) linkage between nucleotides.

21. The gRNA of any one of the preceding claims, wherein the 3′ and/or 5′ end modification comprises or further comprises an inverted abasic modified nucleotide.

22. The gRNA of any one of the preceding claims, wherein the modification in the hairpin region comprises or further comprises a 2′-O-methyl (2′-OMe) modified nucleotide.

23. The gRNA of any one of the preceding claims, wherein the modification in the hairpin region comprises or further comprises a 2′-fluoro (2′-F) modified nucleotide.

24. The gRNA of any one of the preceding claims, wherein the 3′ end modification comprises any of:
i. a modification of any one or more of the last 7, 6, 5, 4, 3, 2, or 1 nucleotides;
ii. one modified nucleotide;
iii. two modified nucleotides;
iv. three modified nucleotides;
v. four modified nucleotides;
vi. five modified nucleotides;
vii. six modified nucleotides; and
viii. seven modified nucleotides.

25. The gRNA of any one of the preceding claims, wherein the at least 5-10 nucleotides comprise nucleotides 54-61 of SEQ ID NO:400, nucleotides 53-60 of SEQ ID NO:400; or nucleotides 54-58 of SEQ ID NO:400, optionally wherein the short-sgRNA comprises modifications at least H1-1 to H1-5 and H2-1 to H2-12.

26. The gRNA of any one of the preceding claims, wherein the at least 5-10 nucleotides:
i. consist of 5-10 nucleotides;
ii. consist of 6-10 nucleotides;
iii. consist of 5 nucleotides;
iv. consist of 6 nucleotides;
v. consist of 7 nucleotides;
vi. consist of 8 nucleotides;
vii. consist of 9 nucleotides;
viii. consist of 10 nucleotides;
ix. consist of 5-10 consecutive nucleotides;
x. consist of 6-10 consecutive nucleotides;
xi. consist of 5 consecutive nucleotides;
xii. consist of 6 consecutive nucleotides;
xiii. consist of 7 consecutive nucleotides;
xiv. consist of 8 consecutive nucleotides;
xv. consist of 9 consecutive nucleotides; or
xvi. consist of 10 consecutive nucleotides.

27. The gRNA of any one of the preceding claims, wherein the 3′ end modification comprises one or more of:
i. a phosphorothioate (PS) linkage between nucleotides;
ii. a 2′-OMe modified nucleotide;
iii. a 2′-O-moe modified nucleotide;
iv. a 2′-F modified nucleotide;
v. an inverted abasic modified nucleotide; and
vi. a combination of one or more of (i.)-(v.).

28. The gRNA of any one of the preceding claims, wherein the short-sgRNA comprises a 3′ tail comprising one or more of:
i. a phosphorothioate (PS) linkage between nucleotides;
ii. a 2′-OMe modified nucleotide;
iii. a 2′-O-moe modified nucleotide;
iv. a 2′-F modified nucleotide;
v. an inverted abasic modified nucleotide; and
vi. a combination of one or more of (i.)-(v.).

29. The gRNA any one of the preceding claims, wherein the short-sgRNA comprises one or more of:
i. 1, 2, 3, 4, 5, 6, 7, 8, 9, or 10 PS linkages between nucleotides;
ii. 1, 2, 3, 4, 5, 6, 7, 8, 9, 10, 12, 14, 16, or 18 PS linkages between nucleotides;
iii. about 1-3, 1-5, 1-6, 1-7, 1-8, 1-9, or 1-10 PS linkages between nucleotides;
iv. about 1-3, 1-5, 1-6, 1-7, 1-8, 1-9, 1-10, 1-12, 1-14, 1-16, 1-18, or 1-20 PS linkages between nucleotides; and
v. PS linkages between each nucleotide.

30. The gRNA of any one of the preceding claims, wherein the 3′ end modification comprises at least one PS linkage, and wherein one or more of:
i. there is one PS linkage, and the linkage is between the last and second to last nucleotide;
ii. there are two PS linkages between the last three nucleotides;
iii. there are PS linkages between any one or more of the last four nucleotides;
iv. there are PS linkages between any one or more of the last five nucleotides; and
v. there are PS linkages between any one or more of the last 2, 3, 4, 5, 6, 7, 8, 9, or 10 nucleotides.

31. The gRNA of claim 30, wherein the 3′ end modification further comprises at least one 2′-OMe, 2′-O-moe, inverted abasic, or 2′-F modified nucleotide.

32. The gRNA of any one of the preceding claims, wherein the 3′ end modification comprises:
i. a modification of one or more of the last 1-7 nucleotides, wherein the modification is a PS linkage, inverted abasic nucleotide, 2′-OMe, 2′-O-moe, 2′-F, or combinations thereof;
ii. a modification to the last nucleotide with 2′-OMe, 2′-O-moe, 2′-F, or combinations thereof, and an optional one or two PS linkages to the next nucleotide and/or the first nucleotide of the 3′ tail;
iii. a modification to the last and/or second to last nucleotide with 2′-OMe, 2′-O-moe, 2′-F, or combinations thereof, and optionally one or more PS linkages;
iv. a modification to the last, second to last, and/or third to last nucleotides with 2′-OMe, 2′-O-moe, 2′-F, or combinations thereof, and optionally one or more PS linkages;
v. a modification to the last, second to last, third to last, and/or fourth to last nucleotides with 2′-OMe, 2′-O-moe, 2′-F, or combinations thereof, and optionally one or more PS linkages; or
vi. a modification to the last, second to last, third to last, fourth to last, and/or fifth to last nucleotides with 2′-OMe, 2′-O-moe, 2′-F, or combinations thereof, and optionally one or more PS linkages.

33. The gRNA of any one of the preceding claims, wherein the sgRNA comprise a 3′ tail, wherein the 3′ tail comprises a modification of any one or more of the nucleotides present in the 3′ tail.

34. The gRNA of claim 33, wherein the 3′ tail is fully modified.

35. The gRNA of claim 33, wherein the at least 5-10 nucleotides comprise nucleotides 54-61 of SEQ ID NO:400, nucleotides 53-60 of SEQ ID NO:400; or nucleotides 54-58 of SEQ ID NO:400, optionally wherein the short-sgRNA comprises modifications at least H1-1 to H1-5 and H2-1 to H2-12.

36. The gRNA of any one of the preceding claims, wherein the short-sgRNA comprises any one or more of:
i. the 3′ end modification as shown in any one of SEQ ID Nos: 1-54;
ii. (i) a 2′-OMe modified nucleotide at the last nucleotide of the conserved region of an sgRNA or short-sgRNA, (ii) three consecutive 2′O-moe modified nucleotides immediately 5′ to the 2′-OMe modified nucleotide, and (iii) three consecutive PS linkages between the last three nucleotides;
iii. (i) five consecutive 2′-OMe modified nucleotides from the 3′ end of the 3′ terminus, and (ii) three PS linkages between the last three nucleotides;
iv. an inverted abasic modified nucleotide at the last nucleotide of the conserved region of an sgRNA or short-sgRNA;
v. (i) an inverted abasic modified nucleotide at the last nucleotide of the conserved region of an sgRNA or short-sgRNA, and (ii) three consecutive 2′-OMe modified nucleotides at the last three nucleotides of the conserved region of an sgRNA or short-sgRNA;
vi. (i) 15 consecutive 2′-OMe modified nucleotides from the 3′ end of the 3′ terminus, (ii) five consecutive 2′-F modified nucleotides immediately 5′ to the 2′-OMe modified nucleotides, and (iii) three PS linkages between the last three nucleotides;
vii. (i) alternating 2′-OMe modified nucleotides and 2′-F modified nucleotides at the last 20 nucleotides of the conserved region of an sgRNA or short-sgRNA, and (ii) three PS linkages between the last three nucleotides;
viii. (i) two or three consecutive 2′-OMe modified nucleotides, and (ii) three PS linkages between the last three nucleotides;
ix. one PS linkage between the last and next to last nucleotides; and
x. 15 or 20 consecutive 2′-OMe modified nucleotides, and (ii) three PS linkages between the last three nucleotides.

37. The gRNA of any one of the preceding claims, wherein the 5′ end modification comprises any one or more of:
i. a modification of any one or more of nucleotides 1-7 of the guide region;
ii. one modified nucleotide;
iii. two modified nucleotides;
iv. three modified nucleotides;
v. four modified nucleotides;
vi. five modified nucleotides;
vii. six modified nucleotides; and
viii. seven modified nucleotides.

38. The gRNA of any one of the preceding claims, wherein the 5′ end modification comprises a modification of between 1 and 7, between 1 and 5, between 1 and 4, between 1 and 3, or between 1 and 2 nucleotides.

39. The gRNA of any one of the preceding claims, wherein the at least 5-10 nucleotides:
i. comprise nucleotides 54-61 of SEQ ID NO:400;
ii. comprise nucleotides 53-60 of SEQ ID NO:400;
iii. comprise nucleotides 54-58 of SEQ ID NO:400.
iv. consist of nucleotides 54-61 of SEQ ID NO:400;
v. consist of nucleotides 53-60 of SEQ ID NO:400; or
vi. consist of nucleotides 54-58 of SEQ ID NO:400.

40. The gRNA of any one of the preceding claims, wherein the 5′ end modification comprises one or more of:
i. a phosphorothioate (PS) linkage between nucleotides;
ii. a 2′-OMe modified nucleotide;
iii. a 2′-O-moe modified nucleotide;
iv. a 2′-F modified nucleotide;
v. an inverted abasic modified nucleotide;
vi. a deoxyribonucleotide;
vii. an inosine; and
viii. combinations of one or more of (i.)-(vii.).

41. The gRNA any one of the preceding claims, wherein the 5′ end modification comprises:
i. 1, 2, 3, 4, 5, 6, and/or 7 PS linkages between nucleotides; or
ii. about 1-2, 1-3, 1-4, 1-5, 1-6, or 1-7 PS linkages between nucleotides.

42. The gRNA of any one of the preceding claims, wherein the 5′ end modification comprises at least one PS linkage, and wherein:
i. there is one PS linkage, and the linkage is between nucleotides 1 and 2 of the guide region;
ii. there are two PS linkages, and the linkages are between nucleotides 1 and 2, and 2 and 3 of the guide region;
iii. there are PS linkages between any one or more of nucleotides 1 and 2, 2 and 3, and 3 and 4 of the guide region;
iv. there are PS linkages between any one or more of nucleotides 1 and 2, 2 and 3, 3 and 4, and 4 and 5 of the guide region;
v. there are PS linkages between any one or more of nucleotides 1 and 2, 2 and 3, 3 and 4, 4 and 5, and 5 and 6 of the guide region;
vi. there are PS linkages between any one or more of nucleotides 1 and 2, 2 and 3, 3 and 4, 4 and 5, 5 and 6, and 6 and 7 of the guide region; or
vii. there are PS linkages between any one or more of nucleotides 1 and 2, 2 and 3, 3 and 4, 4 and 5, 5 and 6, 6 and 7, and 7 and 8 of the guide region.

43. The gRNA of claim 42, wherein the 5′ end modification further comprises at least one 2′-OMe, 2′-O-moe, inverted abasic, or 2′-F modified nucleotide.

44. The gRNA of any one of the preceding claims, wherein the short-sgRNA comprises:
i. a modification of one or more of nucleotides 1-7 of the variable region, wherein the modification is a PS linkage, inverted abasic nucleotide, 2′-OMe, 2′-O-moe, 2′-F, 2′-H (a deoxyribonucleotide), an inosine, and/or combinations thereof;
ii. a modification to the first nucleotide of the guide region with 2′-OMe, 2′-O-moe, 2′-F, 2′-H, an inosine, or combinations thereof, and an optional PS linkage to the next nucleotide;
iii. a modification to the first and/or second nucleotide of the variable region with 2′-OMe, 2′-O-moe, 2′-F, 2′-H, an inosine, or combinations thereof, and optionally one or more PS linkages;
iv. a modification to the first, second, and/or third nucleotides of the variable region with 2′-OMe, 2′-O-moe, 2′-F, 2′-H, an inosine, or combinations thereof, and optionally one or more PS linkages;
v. a modification to the first, second, third, and/or fourth nucleotides of the variable region with 2′-OMe, 2′-O-moe, 2′-F, 2′-H, an inosine, or combinations thereof, and optionally one or more PS linkages; or
vi. a modification to the first, second, third, fourth, and/or fifth nucleotides of the variable region with 2′-OMe, 2′-O-moe, 2′-F, 2′-H, an inosine, or combinations thereof, and optionally one or more PS linkages.

45. The gRNA of any one of the preceding claims, wherein the short-sgRNA comprises any one or more of:
i. a 5′ end modification as shown in any one of SEQ ID Nos: 1-54;
ii. 2′-OMe modified nucleotides at nucleotides 1, 2, and 3 of the guide region;
iii. 2′-OMe modified nucleotides at nucleotides 1, 2, and 3 of the guide region and PS linkages between nucleotides 1 and 2, 2 and 3, and 3 and 4 of the guide region;
iv. 2′-OMe modified nucleotides at nucleotides 1, 2, 3, 4, and 5 of the guide region;
v. 2′-OMe modified nucleotides at nucleotides 1, 2, 3, 4, and 5 of the guide region and PS linkages between nucleotides 1 and 2, 2 and 3, 3 and 4, 4 and 5, and 5 and 6 of the guide region;
vi. 2′O-moe modified nucleotides at nucleotides 1, 2, and 3 of the guide region;
vii. 2′O-moe modified nucleotides at nucleotides 1, 2, and 3 of the guide region and PS linkages between nucleotides 1 and 2, 2 and 3, and 3 and 4 of the guide region;
viii. an inverted abasic modified nucleotide at nucleotide 1 of the guide region;
ix. an inverted abasic modified nucleotide at nucleotide 1 of the guide region and 2′-OMe modified nucleotides at nucleotides 1, 2, and 3 of the guide region; and
x. an inverted abasic modified nucleotide at nucleotide 1 of the guide region, 2′-OMe modified nucleotides at nucleotides 1, 2, and 3 of the guide region, and PS linkages between nucleotides 1 and 2, 2 and 3, 3 and 4, 4 and 5, and 5 and 6 of the variable region.

46. The gRNA of any one of the preceding claims, wherein the upper stem region comprises at least one modification.

47. The gRNA of any one of the preceding claims, wherein the upper stem modification comprises any one or more of:
i. a modification to any one or more of US1-US12 in the upper stem region;
ii. a modification of at least 1, 2, 3, 4, 5, 6, 7, 8, 9, 10, 11, or all 12 nucleotides in the upper stem region; and
iii. a modification of about 1-2, 1-3, 1-4, 1-5, 1-6, 1-7, 1-8, 1-9, 1-10, or 1-12 nucleotides in the upper stem region.

48. The gRNA of claim 47, wherein the upper stem modification comprises one or more of:
i. a 2′-OMe modified nucleotide;
ii. a 2′-O-moe modified nucleotide;
iii. a 2′-F modified nucleotide; and
iv. combinations of one or more of (i.)-(iii.).

49. A guide RNA which is a short-sgRNA comprising a conserved portion of an sgRNA comprising a hairpin region, wherein the hairpin region lacks at least 5-10 nucleotides and wherein the short-sgRNA comprises a 5′ end modification and one or more modification in one or more of:
i. the upper stem region;
ii. the hairpin 1 region; and
iii. the hairpin 2 region,
wherein the 5′ end modification comprises a 5′ protective end modification, such as at least two phosphorothioate (PS) linkages within the first seven nucleotides.

50. The gRNA of claim 49, wherein at least one modification comprises a 2′-O-methyl (2′-OMe) modified nucleotide.

51. The gRNA of claim 49 or claim 50, wherein at least one modification comprises a 2′-fluoro (2′-F) modified nucleotide.

52. The gRNA of any one of claims 49-51, wherein at least one modification comprises a phosphorothioate (PS) bond between nucleotides.

53. The gRNA of any one of claims 49-52, wherein the short-sgRNA comprises one or more modifications in the upper stem region.

54. The gRNA of claim 53, comprising modifications at any one of US1 to US12.

55. The gRNA of any one of claims 49-54, wherein the short-sgRNA comprises one or more modifications in the hairpin 1 region.

56. The gRNA of claim 55, wherein the short-sgRNA comprises a modification at H1-1.

57. The gRNA of any one of claims 49-56, wherein the short-sgRNA comprises one or more modifications in the hairpin 2 region.

58. The gRNA of claim 57, wherein the short-sgRNA comprises a modification at H2-1.

59. The gRNA of any one of claims 49-58, wherein the short-sgRNA comprises modifications at H1-1 to H1-12.

60. The gRNA of any one of claims 49-59, wherein the short-sgRNA comprises modifications at H2-1 to H2-15.

61. The gRNA of any one of claims 49-60, wherein the short-sgRNA comprises one or more modifications in each of the upper stem region, the hairpin 1 region, and the hairpin 2 region.

62. The gRNA of any one of claims 49-61, wherein the short-sgRNA comprises a modified nucleotide between hairpin 1 and hairpin 2 regions.

63. The gRNA of any one of claims 49-62, further comprising a lower stem region comprising a modification.

64. The gRNA of any one of claims 49-63, further comprising a 3′ end modification.

65. The gRNA of claim 64, wherein at least two of the last four nucleotides at the 3′ end of the 3′ terminus are modified.

66. The gRNA of claim 64, wherein at least two of the last four nucleotides at the 3′ end of the 3′ terminus are modified with 2′-OMe, 2′-F, or 2′-O-moe.

67. The gRNA of any one of claims 64-66, further comprising phosphorothioate (PS) bonds between one or more of the last four nucleotides at the 3′ end of the 3′ terminus.

68. The gRNA of any one of claims 49-67, further comprising a bulge region comprising a modification.

69. The gRNA of any one of claims 49-68, further comprising a nexus region comprising a modification.

70. The gRNA of any one of claims 49-69, wherein at least the first three nucleotides at the 5′ end of the variable region, and the last three nucleotides at the 3′ end of the 3′ terminus are modified.

71. The gRNA of any one of claims 49-70, wherein the first four nucleotides at the 5′ end of the variable region, and the last four nucleotides at the 3′ end of the 3′ terminus are linked with phosphorothioate (PS) bonds.

72. The gRNA of any one of claims 70-71, wherein the end modifications comprise 2′-OMe.

73. The gRNA of any one of claims 70-71, wherein the end modifications comprise 2′-F.

74. The gRNA of any one of claims 49-73, wherein the first four nucleotides at the 5′ end of the variable region and the last four nucleotides at the 3′ end of the 3′ terminus are linked with a PS bond, and wherein the first three nucleotides at the 5′ end of the variable region and the last three nucleotides at the 3′ end of the 3′ terminus comprise 2′-OMe modifications.

75. The gRNA of any one of claims 49-74, wherein the first four nucleotides at the 5′ terminus and the last four nucleotides at the 3′ terminus are linked with a PS bond, and wherein the first three nucleotides at the 5′ terminus and the last three nucleotides at the 3′ terminus comprise 2′-OMe, 2′-F, and/or 2′-O-moe modifications.

76. The gRNA of any one of claims 49-75, wherein LS1, LS6, LS7, LS8, LS11, and/or LS12 are modified with 2′-OMe.

77. The gRNA of any one of claims 49-76, wherein each of the nucleotides in the bulge region are modified with 2′-OMe.

78. The gRNA of any one of claims 49-77, wherein at least 50% of the nucleotides in the bulge region are modified with 2′-OMe.

79. The gRNA of any one of claims 49-78, wherein each of the nucleotides in the upper stem region are modified with 2′-OMe.

80. The gRNA of any one of claims 49-79, wherein N16, N17, and/or N18 in the nexus region are modified with 2′-OMe.

81. The gRNA of any one of claims 49-80, wherein N15, N16, N17, and/or N18 in the nexus region are modified.

82. The gRNA of claim 80 or 81, wherein the modifications in the nexus region are selected from 2′-OMe and 2′F.

83. The gRNA of any one of claims 80-82, wherein N16, N17, and N18 are linked with PS bonds.

84. The gRNA of any one of claims 49-83, wherein each of the nucleotides remaining in the hairpin 1 region are modified with 2′-OMe.

85. The gRNA of any one of claims 49-84, wherein each of the nucleotides in the hairpin 2 region are modified with 2′-OMe.

86. A guide RNA which is a short-sgRNA comprising a conserved portion of an sgRNA comprising a hairpin region, wherein the hairpin region lacks at least 5-10 nucleotides and wherein the short-sgRNA comprises a 5′ end modification and a 3′ end modification, wherein the short-sgRNA further comprises any one or more of:
i. at least one modification in the upper stem region; and
ii. a 3′ tail.

87. The gRNA of claim 86, wherein the upper stem modification comprises any one or more of:
i. a modification of each nucleotide (US1-US12) in the upper stem region;
ii. a modification to any one or more of US1-US12 in the upper stem region;
iii. a modification of at least 1, 2, 3, 4, 5, 6, 7, 8, 9, 10, 11, or all 12 nucleotides in the upper stem region; and
iv. a modification of about 1-2, 1-3, 1-4, 1-5, 1-6, 1-7, 1-8, 1-9, 1-10, or 1-12 nucleotides in the upper stem region.

88. The gRNA of any one of claims 86-87, wherein the 5′ end modification comprises any one or more of:
i. a modification of any one or more of nucleotides 1-7 of the variable region;
ii. one modified nucleotide;
iii. two modified nucleotides;
iv. three modified nucleotides;
v. four modified nucleotides;
vi. five modified nucleotides;
vii. six modified nucleotides; and
viii. seven modified nucleotides.

89. The gRNA of any one of claims 86-88, wherein the 5′ end modification comprises any one or more of:
i. a 5′ end modification as shown in any one of SEQ ID Nos: 1-54, 401-532, 1001, 1007-1132, 1205-1212, 1322-1406, 1417-1501, 1511-1596, 3018-3059, 3063-3104, 3108-3149, 3153-3194, 3198-3239, 3243-3284, 3295-3341, 3343-3385, 3388-3430, or 3549-3552;
ii. 2′-OMe modified nucleotides at nucleotides 1, 2, and 3 of the variable region;
iii. 2′-OMe modified nucleotides at nucleotides 1, 2, and 3 of the variable region and PS linkages between nucleotides 1 and 2, 2 and 3, and 3 and 4 of the variable region;
iv. 2′-OMe modified nucleotides at nucleotides 1, 2, 3, 4, and 5 of the variable region;
v. 2′-OMe modified nucleotides at nucleotides 1, 2, 3, 4, and 5 of the variable region and PS linkages between nucleotides 1 and 2, 2 and 3, 3 and 4, 4 and 5, and 5 and 6 of the variable region;
vi. 2′O-moe modified nucleotides at nucleotides 1, 2, and 3 of the variable region;
vii. 2′O-moe modified nucleotides at nucleotides 1, 2, and 3 of the variable region and PS linkages between nucleotides 1 and 2, 2 and 3, and 3 and 4 of the variable region;
viii. an inverted abasic modified nucleotide at nucleotide 1 of the variable region;
ix. an inverted abasic modified nucleotide at nucleotide 1 of the variable region and 2′-OMe modified nucleotides at nucleotides 1, 2, and 3 of the variable region; and
x. an inverted abasic modified nucleotide at nucleotide 1 of the variable region, 2′-OMe modified nucleotides at nucleotides 1, 2, and 3 of the variable region, and PS linkages between nucleotides 1 and 2, 2 and 3, 3 and 4, 4 and 5, and 5 and 6 of the variable region.

90. The gRNA of claim 89, comprising 2′-OMe modified nucleotides at at least nucleotides 1, 2, and 3, of the variable region and PS linkages between nucleotides 1 and 2, 2 and 3, and 3 and 4 of the variable region.

91. The gRNA of claim 89, comprising 2′-OMe modified nucleotides at at least nucleotides 1, 2, 3, and 4 of the variable region and PS linkages between nucleotides 1 and 2, 2 and 3, and 3 and 4 of the variable region.

92. The gRNA of any one of claims 86-91, comprising a 3′ end modification comprising any one or more of:
i. a modification of any one or more of the last 7, 6, 5, 4, 3, 2, or 1 nucleotides;
ii. one modified nucleotide;
iii. two modified nucleotides;
iv. three modified nucleotides;
v. four modified nucleotides;
vi. five modified nucleotides;
vii. six modified nucleotides; and
viii. seven modified nucleotides.

93. The gRNA of any one of claims 86-92, wherein the short-sgRNA comprises any one or more of:
i. a 3′ end modification shown in any one of SEQ ID Nos: 1-54, 401-532, 1001, 1007-1132, 1205-1212, 1322-1406, 1417-1501, 1511-1596, 3018-3059, 3063-3104, 3108-3149, 3153-3194, 3198-3239, 3243-3284, 3295-3341, 3343-3385, 3388-3430, or 3549-3552;
ii. (i) a 2′-OMe modified nucleotide at the last nucleotide of the conserved region of an sgRNA or short-sgRNA, (ii) three consecutive 2′O-moe modified nucleotides immediately 5′ to the 2′-OMe modified nucleotide, and (iii) three consecutive PS linkages between the last three nucleotides;
iii. (i) five consecutive 2′-OMe modified nucleotides, and (ii) three PS linkages between the last three nucleotides;
iv. an inverted abasic modified nucleotide at the last nucleotide of the conserved region of an sgRNA or short-sgRNA;
v. (i) an inverted abasic modified nucleotide at the last nucleotide of the conserved region of an sgRNA or short-sgRNA, and (ii) three consecutive 2′-OMe modified nucleotides at the last three nucleotides of the conserved region of an sgRNA or short-sgRNA;
vi. (i) 15 consecutive 2′-OMe modified nucleotides, (ii) five consecutive 2′-F modified nucleotides immediately 5′ to the 2′-OMe modified nucleotides, and (iii) three PS linkages between the last three nucleotides;
vii. (i) alternating 2′-OMe modified nucleotides and 2′-F modified nucleotides at the last 20 nucleotides of the conserved region of an sgRNA or short-sgRNA, and (ii) three PS linkages between the last three nucleotides;
viii. (i) two or three consecutive 2′-OMe modified nucleotides, and (ii) three PS linkages between the last three nucleotides;
ix. one PS linkage between the last and next to last nucleotides; and
x. 15 or 20 consecutive 2′-OMe modified nucleotides, and (ii) three PS linkages between the last three nucleotides.

94. The gRNA of any one of claims 86-93, wherein the sgRNA comprise a 3′ tail, wherein the 3′ tail comprises a modification of any one or more of the nucleotides present in the 3′ tail.

95. The gRNA of claim 94, wherein the 3′ tail is fully modified.

96. The gRNA of claim 94 wherein the 3′ tail comprises 1, 2, 3, 4, 5, 6, 7, 8, 9, 10, 1-2, 1-3, 1-4, 1-5, 1-6, 1-7, 1-8, 1-9, or 1-10 nucleotides, optionally where any one or more of these nucleotides are modified.

97. A guide RNA which is a short-sgRNA comprising any of SEQ ID Nos: 1-54, 201-254, and 301-354, including the modifications of Table 1.

98. A guide RNA which is a short-sgRNA comprising nucleic acids having at least 99, 98, 97, 96, 95, 94, 93, 92, 91, 90, 85, 80, 75, or 70% identity to the nucleic acids of any one of SEQ ID Nos: 1-54, 201-254, and 301-354, wherein the modification at each nucleotide of the short-sgRNA that corresponds to a nucleotide of the reference sequence identifier in Table 1, is identical to or equivalent to the modification shown in the reference sequence identifier in Table 1.

99. The gRNA of any one of the preceding claims, comprising a YA modification at at least one guide region YA site.

100. The gRNA of any one of the preceding claims, comprising a YA modification at at least one guide region YA site that is not a 5′ end modification.

101. The gRNA of any one of the preceding claims, comprising a YA modification at one or more guide region YA sites, wherein the guide region YA site is at or after nucleotide 8 from the 5′ end of the 5′ terminus.

102. The gRNA of any one of the preceding claims comprising a YA modification at one or more guide region YA sites, wherein the short-sgRNA comprises one or more of:
i. a modification at one or more of H1-1 and H2-1;
ii. a YA modification at 1, 2, 3, 4, or 5 guide region YA sites;
iii. a YA modification at 1, 2, 3, 4, or 5 guide region YA sites, wherein the modification of at least one guide region YA site is different from any 5′ end modification of the sgRNA;
iv. a YA modification at one or more guide region YA sites, wherein the guide region YA site is at or after nucleotide 8 from the 5′ end of the 5′ terminus;
v. a YA modification at one or more guide region YA sites, wherein the guide region YA site is within nucleotides 5-end, 6-end, 7-end, 8-end, 9-end, or 10-end from the 5′ end of the 5′ terminus;
vi. a YA modification at one or more guide region YA sites, wherein the guide region YA site is within 17, 16, 15, 14, 13, 12, 11, 10, or 9 nucleotides of the 3′ terminal nucleotide of the guide region;
vii. a YA modification at a guide region YA site other than a 5′ end modification;
viii. a YA modification at two or more guide region YA sites, wherein the guide region YA sites are at or after nucleotide 8 from the 5′ end of the 5′ terminus;
ix. a YA modification at two or more guide region YA sites, wherein the two guide region YA sites are within nucleotides 5-end, 6-end, 7-end, 8-end, 9-end, or 10-end from the 5′ end of the 5′ terminus;
x. a YA modification at two or more guide region YA sites, wherein the guide region YA sites are within 17, 16, 15, 14, 13, 12, 11, 10, or 9 nucleotides of the 3′ terminal nucleotide of the guide region;
xi. a YA modification at two or more guide region YA sites other than a 5′ end modification; and
xii. a YA modification at two or more guide region YA sites, wherein the modifications of the guide region YA sites comprise a modification that at least one nucleotide located 5′ of the guide region YA site does not comprise.

103. The gRNA of any one of the preceding claims, comprising a YA modification wherein the modification comprises 2′-fluoro, 2′-H, 2′-OMe, ENA, UNA, inosine, or PS.

104. The gRNA of any one of the preceding claims, comprising a YA modification wherein the modification alters the structure of the dinucleotide motif to reduce RNA endonuclease activity.

105. The gRNA of any one of the preceding claims, comprising a YA modification wherein the modification interferes with recognition or cleavage of a YA site by an RNase and/or stabilizes an RNA structure.

106. The gRNA of any one of the preceding claims, comprising a YA modification wherein the modification comprises one or more of:
i. a ribose modification selected from 2′-O-alkyl, 2′-F, 2′-moe, 2′-F arabinose, and 2′-H (deoxyribose);
ii. a bicyclic ribose analog, such as LNA, BNA, and ENA;
iii. an unlocked nucleic acid modification;
iv. a base modification, such as inosine, pseudouridine, and 5′-methylcytosine; and
v. an internucleoside linkage modification such as phosphorothioate.

107. The gRNA of any one of the preceding claims, comprising a YA modification at one or more conserved region YA sites.

108. The gRNA of any one of the preceding claims, comprising a YA modification at one or more of conserved region YA sites 2, 3, 4, and 10.

109. The gRNA of any one of the preceding claims, comprising a YA modification at one or more of conserved region YA sites 1 and 8.

110. The gRNA of any one of the preceding claims, comprising a YA modification of conserved region YA site 1.

111. The gRNA of any one of the preceding claims, comprising a YA modification of conserved region YA site 2.

112. The gRNA of any one of the preceding claims, comprising a YA modification of conserved region YA site 3.

113. The gRNA of any one of the preceding claims, comprising a YA modification of conserved region YA site 4.

114. The gRNA of any one of the preceding claims, comprising a YA modification of conserved region YA site 5.

115. The gRNA of any one of the preceding claims, comprising a YA modification of conserved region YA site 6.

116. The gRNA of any one of the preceding claims, comprising a YA modification of conserved region YA site 7.

117. The gRNA of any one of the preceding claims, comprising a YA modification of conserved region YA site 8.

118. The gRNA of any one of the preceding claims, comprising a YA modification of conserved region YA site 9.

119. The gRNA of any one of the preceding claims, comprising a YA modification of conserved region YA site 10.

120. The gRNA of any one of the preceding claims, comprising one or more of:
i. YA modifications of conserved region YA sites 2, 3, 4, and 10;
ii. YA modifications of conserved region YA sites 2, 3, and 4;
iii. YA modifications of conserved region YA sites 2, 3, and 10;
iv. YA modifications of conserved region YA sites 2, 4, and 10;
v. YA modifications of conserved region YA sites 3, 4, and 10;
vi. YA modifications of conserved region YA sites 2 and 10;
vii. YA modifications of conserved region YA sites 2 and 4;
viii. YA modifications of conserved region YA sites 2 and 3;
ix. YA modifications of conserved region YA sites 3 and 4;
x. YA modifications of conserved region YA sites 3 and 10;
xi. YA modifications of conserved region YA sites 4 and 10
xii. YA modifications of conserved region YA sites 1 and 5;
xiii. YA modifications of conserved region YA sites 1 and 6;
xiv. YA modifications of conserved region YA sites 1 and 7;
xv. YA modifications of conserved region YA sites 1 and 8;
xvi. YA modifications of conserved region YA sites 1 and 9;
xvii. YA modifications of conserved region YA sites 8 and 5;
xviii. YA modifications of conserved region YA sites 8 and 6;
xix. YA modifications of conserved region YA sites 8 and 7; and
xx. YA modifications of conserved region YA sites 8 and 9;
xxi. optionally wherein the sgRNA further comprises YA modifications of conserved region YA sites 2, 3, 4, and/or 10.

121. The gRNA of any one of the preceding claims, wherein at least one modified YA site comprises a 2′-OMe modification, optionally at the pyrimidine of the YA site.

122. The gRNA of any one of the preceding claims, wherein at least one modified YA site comprises a 2′-fluoro modification, optionally at the pyrimidine of the YA site.

123. The gRNA of any one of the preceding claims, wherein at least one modified YA site comprises a PS modification, optionally at the pyrimidine of the YA site.

124. The gRNA of any one of the preceding claims, wherein the gRNA comprises a guide region that comprises modifications at at least 1, 2, 3, 4, 5, 6, 7, 8, 9, 10, 11, 12, 13, or all of the following nucleotides: 1, 2, 3, 4, 6, 7, 8, 9, 10, 11, 13, 14, 17, and 18, optionally wherein the modifications are 2′-OMe, 2′-fluoro, 2′-H, inosine, or phosphorothioate modifications.

125. The gRNA of any one of the preceding claims, wherein the short-sgRNA comprises a guide region that comprises modifications at nucleotides 1, 2, 3, 4, 6, 7, 8, 9, 10, 11, 13, 14, 17, and 18, optionally wherein the modifications are 2′-OMe, 2′-fluoro, 2′-H, inosine, or phosphorothioate modifications.

126. The gRNA of claims 124-125, wherein 2′-OMe modifications are not present in the guide region at nucleotides 6-11 and 13-end.

127. The gRNA of claims 124-126, wherein 2′-fluoro modifications are not present in the guide region at nucleotides 1-7, 15, 16, and 19-end.

128. The gRNA of claims 124-127, wherein phosphorothioate modifications are not present in the guide region at nucleotides 4, 5, 11-14, 17, and 18.

129. The gRNA of claims 124-128, wherein the guide region comprises an unmodified nucleotide 20.

130. The gRNA of claims 124-129, wherein the guide region consists of 20 nucleotides.

131. The gRNA of claims 124-130, wherein the guide region comprises a YA site at nucleotides 5-6 and a modification at nucleotide 5.

132. The gRNA of claims 124-131, wherein the guide region comprises a YA site at nucleotides 12-13 and a modification at nucleotide 12.

133. The gRNA of claims 124-132, wherein the guide region comprises a YA site at nucleotides 15-16 and a modification at nucleotide 15.

134. The gRNA of claims 124-133, wherein the guide region comprises a YA site at nucleotides 16-17 and a modification at nucleotide 16.

135. The gRNA of claims 124-134, wherein the guide region comprises a YA site at nucleotides 19-20 and a modification at nucleotide 19.

136. The gRNA of claim 124-130 or 132-135, wherein the guide region does not comprise a YA site at nucleotides 5-6 and nucleotide 5 is unmodified.

137. The gRNA of claim 124-131 or 133-136, wherein the guide region does not comprise a YA site at nucleotides 12-13 and nucleotide 12 is unmodified.

138. The gRNA of claim 124-132 or 134-137, wherein the guide region does not comprise a YA site at nucleotides 15-16 and nucleotide 15 is unmodified.

139. The gRNA of claim 124-133 or 135-138, wherein the guide region does not comprise a YA site at nucleotides 16-17 and nucleotide 16 is unmodified.

140. The gRNA of claim 124-134 or 136-139, wherein the guide region does not comprise a YA site at nucleotides 19-20 and nucleotide 19 is unmodified.

141. The gRNA of claims 124-140, wherein the short-sgRNA comprises a guide region that comprises one or more of the following:
i. 2′-OMe and phosphorothioate modifications at nucleotide 1;
ii. 2′-OMe and phosphorothioate modifications at nucleotide 2;
iii. 2′-OMe and phosphorothioate modifications at nucleotide 3;
iv. a 2′-OMe modification at nucleotide 4;
v. a phosphorothioate modification at nucleotide 6;
vi. a phosphorothioate modification at nucleotide 7;
vii. 2′-fluoro and phosphorothioate modifications at nucleotide 8;
viii. 2′-fluoro and phosphorothioate modifications at nucleotide 9;
ix. 2′-fluoro and phosphorothioate modifications at nucleotide 10;
x. a 2′-fluoro modification at nucleotide 11;
xi. a 2′-fluoro modifications at nucleotide 13;
xii. a 2′-fluoro modifications at nucleotide 14;
xiii. a 2′-fluoro modifications at nucleotide 17; and
xiv. a 2′-fluoro modifications at nucleotide 18.

142. The gRNA of claims 124-141, wherein the guide region comprises each of the modifications set forth in the preceding claim.

143. The gRNA of claims 124-142, wherein the guide region comprises at least 1, 2, 3, or 4 of the following:
i. a 2′-OMe modification at nucleotide 5 if nucleotides 5 and 6 form a YA site;
ii. a 2′-OMe modification at nucleotide 12 if nucleotides 12 and 13 form a YA site;
iii. a phosphorothioate modification at nucleotide 15 if nucleotides 15 and 16 form a YA site;
iv. a phosphorothioate modification at nucleotide 16 if nucleotides 16 and 17 form a YA site; and
v. a phosphorothioate or 2′-fluoro modification at nucleotide 19 if nucleotides 19 and 20 form a YA site.

144. The gRNA of claims 124-143, wherein the guide region comprises a YA site at nucleotides 5-6 and a 2′-OMe modification at nucleotide 5.

145. The gRNA of claims 124-144, wherein the guide region comprises a YA site at nucleotides 12-13 and a 2′-OMe modification at nucleotide 12.

146. The gRNA of claims 124-145, wherein the guide region comprises a YA site at nucleotides 15-16 and a phosphorothioate modification at nucleotide 15.

147. The gRNA of claims 124-146, wherein the guide region comprises a YA site at nucleotides 16-17 and a phosphorothioate modification at nucleotide 16.

148. The gRNA of claims 124-147, wherein the guide region comprises a YA site at nucleotides 19-20 and a phosphorothioate modification at nucleotide 19.

149. The gRNA of claims 124-148, wherein the guide region comprises a 2′-fluoro modification at nucleotide 19.

150. The gRNA of claims 124-149, wherein the guide region comprises an unmodified nucleotide 15 or only a phosphorothioate modification at nucleotide 15.

151. The gRNA of claims 124-150, wherein the guide region comprises an unmodified nucleotide 16 or only a phosphorothioate modification at nucleotide 16.

152. A guide RNA which is a single guide RNA (sgRNA) comprising:
i. a YA modification at two or more guide region YA sites;
ii. a YA modification at one or more of conserved region YA sites 2, 3, 4, and 10; and
iii. a YA modification at one or more of conserved region YA sites 1 and 8.

153. A guide RNA which is a single guide RNA (sgRNA) comprising:
i. a YA modification at one or more guide region YA sites that are at or after nucleotide 8 from the 5′ end of the 5′ terminus;
ii. a YA modification at one or more of conserved region YA sites 2, 3, 4, and 10; and optionally
iii. a YA modification at one or more of conserved region YA sites 1 and 8.

154. A guide RNA which is a single guide RNA (sgRNA) comprising:
i. a YA modification at one or more guide region YA sites that are within 13 nucleotides of the 3′ terminal nucleotide of the guide region;
ii. a YA modification at one or more of conserved region YA sites 2, 3, 4, and 10; and
iii. a YA modification at one or more of conserved region YA sites 1 and

155. A guide RNA which is a single guide RNA (sgRNA) comprising:
i. a 5′ end modification and a 3′ end modification;
ii. a YA modification at one or more of conserved region YA sites 2, 3, 4, and 10; and
iii. a YA modification at one or more of conserved region YA sites 1 and 8.

156. A guide RNA which is a single guide RNA (sgRNA) comprising:
i. a YA modification at at least one guide region YA site, wherein the modification of the guide region YA site comprises a modification at at least one nucleotide located 5′ of the guide region YA site does not comprise;
ii. a YA modification at one or more of conserved region YA sites 2, 3, 4, and 10; and
iii. a YA modification at one or more of conserved region YA sites 1 and 8.

157. A guide RNA which is a single guide RNA (sgRNA) comprising:
i. a YA modification at one or more of conserved region YA sites 2, 3, 4, and 10; and
ii. a YA modification at conserved region YA sites 1 and 8.

158. A guide RNA which is a single guide RNA (sgRNA) comprising:
i. a YA modification at one or more guide region YA sites that are at or after nucleotide 8 from the 5′ end of the 5′ terminus;
ii. a YA modification at one or more of conserved region YA sites 2, 3, 4, and 10; and
iii. a modification at one or more of H1-1 and H2-1.

159. A guide RNA which is a single guide RNA (sgRNA) comprising:
i. a YA modification at one or more of conserved region YA sites 2, 3, 4, and 10;
ii. a YA modification at one or more of conserved region YA sites 1, 5, 6, 7, 8, and 9; and
iii. a modification at one or more of H1-1 and H2-1.

160. A guide RNA which is an sgRNA comprising any one or more of the following:
i. a modification, such as a YA modification, at one or more nucleotides located at or after nucleotide 6 from the 5′ end of the 5′ terminus;
ii. a YA modification at one or more guide sequence YA sites;
iii. a modification at one or more of B3, B4, and B5, wherein B6 does not comprise a 2′-OMe modification or comprises a modification other than 2′-OMe;
iv. a modification at LS10, wherein LS10 comprises a modification other than 2′-fluoro; and/or
v. a modification at N2, N3, N4, N5, N6, N7, N10, or N11; and
wherein at least one of the following is true:
a. at least one of nucleotides 8-11, 13, 14, 17, or 18 from the 5′ end of the 5′ terminus does not comprise a 2′-fluoro modification;
b. at least one of nucleotides 6-10 from the 5′ end of the 5′ terminus does not comprise a phosphorothioate linkage;
c. at least one of B2, B3, B4, or B5 does not comprise a 2′-OMe modification;
d. at least one of LS1, LS8, or LS10 does not comprise a 2′-OMe modification;
e. at least one of N2, N3, N4, N5, N6, N7, N10, N11, N16, or N17 does not comprise a 2′-OMe modification;
f. H1-1 comprises a modification;
g. H2-1 comprises a modification; or
h. at least one of H1-2, H1-3, H1-4, H1-5, H1-6, H1-7, H1-8, H1-9, H1-10, H2-1, H2-2, H2-3, H2-4, H2-5, H2-6, H2-7, H2-8, H2-9, H2-10, H2-11, H2-12, H2-13, H2-14, or H2-15 does not comprise a phosphorothioate linkage.

161. A guide RNA comprising any one or more of the following:
i. a modification, such as a YA modification, at one or more nucleotides located at or after nucleotide 6 from the 5′ end of the 5′ terminus; or
ii. a YA modification at one or more guide sequence YA sites;
wherein at least one of the following is true:
a. at least one of nucleotides 8-11, 13, 14, 17, or 18 from the 5′ end of the 5′ terminus does not comprise a 2′-fluoro modification; or
b. at least one of nucleotides 6-10 from the 5′ end of the 5′ terminus does not comprise a phosphorothioate linkage;
and wherein at least one of the following is also true:
c. at least one of nucleotides 7-10 from the 5′ end of the 5′ terminus does not comprise a 2′-OMe modification;
d. nucleotide 20 from the 5′ end of the 5′ terminus does not comprise a 2′-OMe modification; or
e. the guide RNA comprises a 2′-fluoro modification at any one or more of nucleotides 1-20 from the 5′ end of the 5′ terminus and at least one of nucleotides 11, 12, 13, 14, 17, or 18 from the 5′ end of the 5′ terminus does not comprise a 2′-fluoro modification, optionally wherein nucleotide 12 from the 5′ end of the 5′ terminus does not comprise a 2′-fluoro modification.

162. A guide RNA which is an sgRNA comprising a guanosine at N14 and/or one or more of the following:
i. a YA modification at one or more guide region YA sites that are at or after nucleotide 8 from the 5′ end of the 5′ terminus;
ii. a YA modification at one or more of conserved region YA sites 1, 5, and 6, wherein if YA site 6 is modified at LS12 and LS9is not modified, then the modification of LS12 is other than 2′-OMe;
iii. a modification at LS9, wherein if LS9 is modified and LS5, LS7, and LS12 are not modified, then the modification of LS9 is other than 2′-fluoro,
iv. a modification at LS12, wherein if LS12 is modified and LS9 is not modified, then the modification of LS12 is other than 2′-OMe;
v. a modification at LS8 or LS11, wherein at least one of LS8 and LS11 comprises a modification other than 2′-OMe; and/or
vi. a modification at N6, N14, or N17, wherein if N17 is modified and N6 and N14 are not modified, then the modification of N17 is other than 2′-fluoro and other than 2′-OMe;
and wherein at least one of the following is true:
a. at least one of nucleotides 8-11, 13-14, 17, or 18 from the 5′ end of the 5′ terminus does not comprise a 2′-fluoro modification;
b. at least one of nucleotides 6-10 from the 5′ end of the 5′ terminus does not comprise a phosphorothioate linkage;
c. at least one of B2, B3, B4, or B5 does not comprise a 2′-OMe modification;
d. at least one of LS1, LS8, or LS10 does not comprise a 2′-OMe modification;
e. at least one of N2, N3, N4, N5, N6, N7, N10, N11, N16, or N17 does not comprise a 2′-OMe modification;
f. H1-1 comprises a modification;
g. H2-1 comprises a modification; or
h. at least one of H1-2, H1-3, H1-4, H1-5, H1-6, H1-7, H1-8, H1-9, H1-10, H2-1, H2-2, H2-3, H2-4, H2-5, H2-6, H2-7, H2-8, H2-9, H2-10, H2-11, H2-12, H2-13, H2-14, or H2-15 does not comprise a phosphorothioate linkage.

163. The gRNA of claim 161 or 162, comprising:
i. a YA modification at 1, 2, 3, 4, or 5 guide region YA sites;
ii. a YA modification at 1, 2, 3, 4, or 5 guide region YA sites, wherein the modification of at least one guide region YA site is different from any 5′ end modification of the sgRNA;
iii. a YA modification at one or more guide region YA sites that are at or after nucleotide 8 from the 5′ end of the 5′ terminus;
iv. a YA modification at one or more guide region YA sites that are is within nucleotides 5-end, 6-end, 7-end, 8-end, 9-end, or 10-end from the 5′ end of the 5′ terminus;
v. a YA modification at one or more guide region YA sites that are within 17, 16, 15, 14, 13, 12, 11, 10, or 9 nucleotides of the 3′ terminal nucleotide of the guide region;
vi. a YA modification at a guide region YA site other than a 5′ end modification; or
vii. a YA modification at a guide region YA site, wherein the modification of the guide region YA site comprises a modification at at least one nucleotide located 5′ of the guide region YA site does not comprise.

164. The gRNA of claim 163, comprising:
i. a YA modification at two or more guide region YA sites that are at or after nucleotide 8 from the 5′ end of the 5′ terminus;
ii. a YA modification at two or more guide region YA sites that are within nucleotides 5-end, 6-end, 7-end, 8-end, 9-end, or 10-end from the 5′ end of the 5′ terminus;
iii. a YA modification at two or more guide region YA sites that are within 17, 16, 15, 14, 13, 12, 11, 10, or 9 nucleotides of the 3′ terminal nucleotide of the guide region;
iv. a YA modification at two or more guide region YA sites other than a 5′ end modification; or
v. a YA modification at a two or more guide region YA sites, wherein the modifications of the guide region YA sites comprise a modification at at least one nucleotide located 5′ of the guide region YA site does not comprise.

165. The gRNA of claim 163, comprising:
i. a YA modification at three or more guide region YA sites that are at or after nucleotide 8 from the 5′ end of the 5′ terminus;
ii. a YA modification at three or more guide region YA sites that are within nucleotides 5-end, 6-end, 7-end, 8-end, 9-end, or 10-end from the 5′ end of the 5′ terminus;
iii. a YA modification at three or more guide region YA sites that are within 17, 16, 15, 14, 13, 12, 11, 10, or 9 nucleotides of the 3′ terminal nucleotide of the guide region;
iv. a YA modification at three or more guide region YA sites other than a 5′ end modification; or
v. a YA modification at a three or more guide region YA sites, wherein the modifications of the guide region YA sites comprise a modification at at least one nucleotide located 5′ of the guide region YA site does not comprise.

166. The gRNA of any one of claims 161-165, comprising at least one YA modification at nucleotide 6 from the 5′ end of the 5′ terminus.

167. The gRNA of any one of claims 161-166, comprising at least one YA modification at nucleotide 7 from the 5′ end of the 5′ terminus.

168. The gRNA of any one of claims 161-167, comprising at least one YA modification at nucleotide 8 from the 5′ end of the 5′ terminus.

169. The gRNA of any one of claims 161-168, comprising at least one YA modification at nucleotide 9 from the 5′ end of the 5′ terminus.

170. The gRNA of any one of claims 161-169, comprising at least one YA modification at nucleotide 10 from the 5′ end of the 5′ terminus.

171. The gRNA of any one of claims 161-170, comprising at least one YA modification at nucleotide 11 from the 5′ end of the 5′ terminus.

172. The gRNA of any one of claims 161-171, comprising at least one YA modification at nucleotide 12 from the 5′ end of the 5′ terminus.

173. The gRNA of any one of claims 161-172, comprising at least one YA modification at nucleotide 13 from the 5′ end of the 5′ terminus.

174. The gRNA of any one of claims 161-173, comprising at least one YA modification at nucleotide 14 from the 5′ end of the 5′ terminus.

175. The gRNA of any one of claims 161-174, comprising at least one YA modification at nucleotide 15 from the 5′ end of the 5′ terminus.

176. The gRNA of any one of claims 161-175, comprising at least one YA modification at nucleotide 16 from the 5′ end of the 5′ terminus.

177. The gRNA of any one of claims 161-176, comprising at least one YA modification at nucleotide 17 from the 5′ end of the 5′ terminus.

178. The gRNA of any one of claims 161-177, comprising at least one YA modification at nucleotide 18 from the 5′ end of the 5′ terminus.

179. The gRNA of any one of claims 161-178, comprising at least one YA modification at nucleotide 19 from the 5′ end of the 5′ terminus.

180. The gRNA of any one of claims 161-179, comprising at least one YA modification at nucleotide 20 from the 5′ end of the 5′ terminus.

181. The gRNA of any one of claims 161-180, wherein at least 1, 2, 3, 4, 5, 6, 7, or 8 of nucleotides 8-11, 13-14, and 17-18 from the 5′ end of the 5′ terminus comprise a YA modification, optionally wherein the modification comprises 2′-fluoro, 2′-H, 2′-OMe, or PS.

182. The gRNA of claim 181, wherein the modification is 2′-fluoro.

183. The gRNA of claim 181, wherein the modification is 2′-OMe or 2′-H.

184. The gRNA of claim 181, wherein the modification is PS.

185. The gRNA of any one of claims 161-184, wherein at least 1, 2, 3, 4, or 5 of nucleotides 6-10 from the 5′ end of the 5′ terminus comprise a YA modification, optionally wherein the modification comprises 2′-fluoro, 2′-H, 2′-OMe, inosine, or PS.

186. The gRNA of claim 185, wherein the modification is PS.

187. The gRNA of claim 185, wherein the modification is 2′-fluoro or 2′-H.

188. The gRNA of claim 185, wherein the modification is 2′-OMe.

189. The gRNA of any one of claims 161-188, comprising any one or more of the following:
i. 1, 2, 3, 4, 5, 6, 7, or 8 YA modifications of nucleotides 8-11, 13-14, and 17-18 from the 5′ end of the 5′ terminus, wherein the YA modifications are optionally 2′-fluoro modifications, and a modification other than 2′-fluoro at one or more of nucleotides 6-10 from the 5′ terminus;
ii. a YA modification other than PS at one or more of nucleotides 8-11, 13-14, and 17-18 from the 5′ end of the 5′ terminus, and 1, 2, 3, 4, or 5 YA modifications at nucleotides 6-10 from the 5′ end of the 5′ terminus, optionally wherein the modifications are PS modifications;
iii. 1, 2, 3, 4, 5, 6, 7, or 8 YA modifications at nucleotides 8-11, 13-14, and 17-18 from the 5′ end of the 5′ terminus, wherein the YA modifications are optionally 2′-fluoro modifications, and modifications other than 2′-fluoro at nucleotides 6-10 from the 5′ end of the 5′ terminus;
iv. YA modifications other than PS at each of nucleotides 8-11, 13-14, and 17-18 from the 5′ end of the 5′ terminus, and 1, 2, 3, 4, or 5 YA modifications at nucleotides 6-10 from the 5′ end of the 5′ terminus, wherein the modifications are optionally PS modifications;
v. 1, 2, 3, 4, 5, 6, 7, or 8 YA modifications at nucleotides 8-11, 13-14, and 17-18 from the 5′ end of the 5′ terminus, wherein the YA modifications are optionally 2′-fluoro modifications, and one or more PS modification at any one of nucleotides 6-10 from the 5′ end of the 5′ terminus;
vi. at least one 2′-fluoro modification at any one of nucleotides 8-11, 13-14, and 17-18 from the 5′ end of the 5′ terminus, and 1, 2, 3, 4, or 5 YA modifications of nucleotides 6-10 from the 5′ end of the 5′ terminus, wherein the modifications are optionally PS modifications;
vii. 1, 2, 3, 4, 5, 6, 7, or 8 YA modifications of nucleotides 8-11, 13-14, and 17-18 from the 5′ end of the 5′ terminus, wherein the YA modifications are optionally 2′-fluoro modifications, and a PS modification at each of nucleotides 6-10 from the 5′ end of the 5′ terminus; or
viii. a 2′-fluoro modification at each of nucleotides 8-11, 13-14, and 17-18 from the 5′ end of the 5′ terminus, and 1, 2, 3, 4, or 5 YA modifications of nucleotides 6-10 from the 5′ end of the 5′ terminus, wherein the modifications are optionally PS modifications.

190. The gRNA of any one of claims 161-189, wherein:
i. nucleotides 4-20 from the 5′ end of the 5′ terminus comprise at least 2, 3, or 4 modified YA sites including a first modified YA site comprising a 2′-OMe modification and a second modified YA site comprising a 2′-fluoro modification or a PS modification;
ii. nucleotides 4-20 from the 5′ end of the 5′ terminus comprise at least 2, 3, or 4 modified YA sites including a first modified YA site comprising a 2′-fluoro modification and a second modified YA site comprising a 2′-OMe modification or a PS modification;
iii. nucleotides 4-20 from the 5′ end of the 5′ terminus comprise at least 2, 3, or 4 modified YA sites including a first modified YA site comprising a PS modification and a second modified YA site comprising a 2′-OMe modification or a 2′-fluoro modification;
iv. nucleotides 4-20 from the 5′ end of the 5′ terminus comprise at least 2, 3, or 4 modified YA sites including a YA modification;
v. nucleotides 4-20 from the 5′ end of the 5′ terminus comprise at least 3 or 4 modified YA sites including a first modified YA site comprising a 2′-OMe modification, a second modified YA site comprising a 2′-fluoro modification, and a third modified YA site comprising a PS modification;
vi. nucleotides 4-20 from the 5′ end of the 5′ terminus comprise at least 3 or 4 modified YA sites including a first modified YA site comprising a 2′-OMe modification, a second modified YA site comprising a 2′-fluoro modification, a third modified YA site comprising a 2′-fluoro modification, and a fourth modified YA site comprising a PS modification;
vii. nucleotides 4-20 from the 5′ end of the 5′ terminus comprise at least 3 or 4 modified YA sites including a YA modification;
viii. nucleotides 4-20 from the 5′ end of the 5′ terminus comprise at least 4 modified YA sites including a first modified YA site comprising a 2′-OMe modification, a second modified YA site comprising a 2′-fluoro modification, a third modified YA site comprising a PS modification, and a fourth modified YA site comprising a PS modification; or
ix. nucleotides 4-40 from the 5′ end of the 5′ terminus comprise at least 4 modified YA sites including a YA modification.

191. The gRNA of any one of claims 161-190, wherein nucleotides 4-20 from the 5′ end of the 5′ terminus comprise at least 5 modified YA sites.

192. The gRNA of any one of claims 161-191, wherein the at least 5 modified YA sites include a fifth modified YA site comprising a PS modification, optionally wherein the third modified YA site comprises a 2′-fluoro modification.

193. The gRNA of any one of claims 161-192, wherein the first, second, and (if applicable) third, fourth, and fifth of the at least 5 modified YA sites are arranged in the 5′ to 3′ direction.

194. The gRNA of any one of claims 161-193, wherein the first, second, and (if applicable) third, fourth, and fifth of the at least 5 modified YA sites are not arranged in the 5′ to 3′ direction.

195. The gRNA of any one of claims 161-194, wherein nucleotides 4-20 from the 5′ end of the 5′ terminus comprise at least 2, 3, 4, or 5 modified YA sites comprising a deoxyribonucleotide, optionally wherein the deoxyribonucleotide is the pyrimidine of the YA sites.

196. The gRNA of any one of claims 161-195, wherein:
i. at least 1, 2, 3, or 4 of nucleotides 8-11 from the 5′ end of the 5′ terminus comprise a YA modification, which is optionally a 2′-fluoro modification;
ii. at least 1, 2, 3, 4, 5, 6, 7, or 8 of nucleotides 8-11, 13, 14, 17, and 18 from the 5′ end of the 5′ terminus comprise a YA modification, optionally wherein the YA modifications are 2′-OMe if present at nucleotides 8-11 and 2′-fluoro if present at nucleotides 13, 14, 17, or 18;
iii. at least one or both of nucleotides 17 and 18 from the 5′ end of the 5′ terminus comprise a YA modification, which is optionally a 2′-fluoro modification;
iv. at least one or both of nucleotides 17 and 18 from the 5′ end of the 5′ terminus comprise a YA modification, which is optionally a 2′-fluoro modification; or
v. at least 1, 2, 3, 4, 5, 6, 7, 8, 9, 10, 11, 12, or 13 of nucleotides 4-14, 17, and 18 from the 5′ end of the 5′ terminus comprise a YA modification, which is optionally a 2′-fluoro modification.

197. The gRNA of any one of claims 161-196, wherein at least 1, 2, 3, 4, 5, or 6 of nucleotides 4-10 from the 5′ end of the 5′ terminus comprise a YA modification, which is optionally a 2′-OMe modification.

198. The gRNA of any one of claims 161-197, wherein nucleotides 4-10 from the 5′ end of the 5′ terminus comprise a YA modification, which is optionally a 2′-OMe modification.

199. The gRNA of any one of claims 161-198, wherein:
i. at least one of nucleotides 1-3 from the 5′ end of the 5′ terminus comprise a 5′ protective end modification, which is optionally a 2′-OMe modification;
ii. at least two of nucleotides 1-3 from the 5′ end of the 5′ terminus comprise a 5′ protective end modification, which is optionally a 2′-OMe modification; or
iii. each of nucleotides 1-3 from the 5′ end of the 5′ terminus comprise a 5′ protective end modification, which is optionally a 2′-OMe modification.

200. The gRNA of any one of claims 161-199, wherein at least 1, 2, 3, 4, or 5 of nucleotides 11, 13, 14, 17, and 18 from the 5′ end of the 5′ terminus comprise a 5′ end modification, which is optionally a 2′-fluoro modification.

201. The gRNA of any one of claims 161-200, wherein nucleotide 15 from the 5′ end of the 5′ terminus is unmodified or modified only with phosphorothioate.

202. The gRNA of any one of claims 161-200, wherein nucleotide 16 from the 5′ terminus is unmodified or modified only with phosphorothioate.

203. The gRNA of any one of the preceding claims, wherein nucleotide 3 from the 5′ end of the 5′ terminus is unmodified or modified only with phosphorothioate.

204. The gRNA of any one of claims 161-203, which is a crRNA or dgRNA.

205. The gRNA of any one of claims 161-203, which is an sgRNA.

206. The gRNA of any one of claims 161-203, which is a short-sgRNA.

207. The gRNA of any one of claim 205 or 206, comprising a YA modification of conserved region YA site 1.

208. The gRNA of any one of claims 205-207, comprising a YA modification of conserved region YA site 2.

209. The gRNA of any one of claims 205-208, comprising a YA modification of conserved region YA site 3.

210. The gRNA of any one of claims 205-209, comprising a YA modification of conserved region YA site 4.

211. The gRNA of any one of claims 205-210, comprising a YA modification of conserved region YA site 5.

212. The gRNA of any one of claims 205-211, comprising a YA modification of conserved region YA site 6.

213. The gRNA of any one of claims 205-212, comprising a YA modification of conserved region YA site 7.

214. The gRNA of any one of claims 205-213, comprising a YA modification of conserved region YA site 8.

215. The gRNA of any one of claims 205-214, comprising a YA modification of conserved region YA site 9.

216. The gRNA of any one of claims 205-215, comprising a YA modification of conserved region YA site 10.

217. The gRNA of any one of claims 205-216, comprising:
i. YA modifications of conserved region YA sites 2, 3, 4, and 10;
ii. YA modifications of conserved region YA sites 2, 3, and 4;
iii. YA modifications of conserved region YA sites 2, 3, and 10;
iv. YA modifications of conserved region YA sites 2, 4, and 10;
v. YA modifications of conserved region YA sites 3, 4, and 10;
vi. YA modifications of conserved region YA sites 2 and 10;
vii. YA modifications of conserved region YA sites 2 and 4;
viii. YA modifications of conserved region YA sites 2 and 3;
ix. YA modifications of conserved region YA sites 3 and 4;
x. YA modifications of conserved region YA sites 3 and 10; or
xi. YA modifications of conserved region YA sites 4 and 10.

218. The gRNA of any one of claims 205-217, comprising:
i. YA modifications of conserved region YA sites 1 and 5;
ii. YA modifications of conserved region YA sites 1 and 6;
iii. YA modifications of conserved region YA sites 1 and 7;
iv. YA modifications of conserved region YA sites 1 and 8;
v. YA modifications of conserved region YA sites 1 and 9;
vi. YA modifications of conserved region YA sites 8 and 5;
vii. YA modifications of conserved region YA sites 8 and 6;
viii. YA modifications of conserved region YA sites 8 and 7; or
ix. YA modifications of conserved region YA sites 8 and 9;
optionally wherein the sgRNA further comprises YA modifications of conserved region YA sites 2, 3, 4, and 10.

219. The gRNA of any one of claims 205-218, wherein at least one modified YA site comprises a 2′-OMe modification, optionally at the pyrimidine of the YA site.

220. The gRNA of any one of claims 205-219, wherein at least one modified YA site comprises a 2′-fluoro modification, optionally at the pyrimidine of the YA site.

221. The gRNA of any one of claims 205-220, wherein at least one modified YA site comprises a PS modification, optionally at the pyrimidine of the YA site.

222. The gRNA of any one of claims 205-221, wherein at least 2, 3, 4, 5, 6, 7, 8, 9, or 10 modified YA sites comprise a 2′-OMe modification, optionally at the pyrimidines of the YA sites.

223. The gRNA of any one of claims205-222, wherein at least 2, 3, 4, 5, 6, 7, 8, 9, or 10 modified YA sites comprise a 2′-fluoro modification, optionally at the pyrimidines of the YA sites.

224. The gRNA of any one of claims205-223, wherein at least 2, 3, 4, 5, 6, 7, 8, 9, or 10 modified YA sites comprise a PS modification, optionally at the pyrimidines of the YA sites.

225. The gRNA of any one of claims205-224, wherein at least 2, 3, 4, 5, 6, 7, 8, 9, or 10 modified YA sites comprise a ribose modification at the 2′ position, optionally at the pyrimidines of the YA sites, and optionally chosen from a 2′-O-alkyl, 2′-H, and 2′-fluoro modification.

226. The gRNA of any one of claims 205-225, wherein:
i. conserved region YA sites 1 and 8 comprise 2′-fluoro modifications, optionally at the pyrimidines of the YA sites;
ii. conserved region YA sites 5 and 6; 5 and 7; 5 and 9; 6 and 7; 6 and 9; 5, 6, and 7; 5, 6, and 9; 6, 7, and 9; or 5, 6, 7, and 9 comprise 2′-OMe modifications, optionally at the pyrimidines of the YA sites;
iii. conserved region YA site 1 comprises a 2′-fluoro modification and conserved region YA sites 5 and 6; 5 and 7; 5 and 9; 6 and 7; 6 and 9; 5, 6, and 7; 5, 6, and 9; 6, 7, and 9; or 5, 6, 7, and 9 comprise 2′-OMe modifications, optionally at the pyrimidines of the YA sites;
iv. conserved region YA site 8 comprises a 2′-fluoro modification and conserved region YA sites 5 and 6; 5 and 7; 5 and 9; 6 and 7; 6 and 9; 5, 6, and 7; 5, 6, and 9; 6, 7, and 9; or 5, 6, 7, and 9 comprise 2′-OMe modifications, optionally at the pyrimidines of the YA sites;
v. conserved region YA site 1 comprises a 2′-fluoro modification at the pyrimidine of the YA sites and YA sites 5 and 6; 5 and 7; 5 and 9; 6 and 7; 6 and 9; 5, 6, and 7; 5, 6, and 9; 6, 7, and 9; or 5, 6, 7, and 9 comprise 2′-OMe modifications, optionally at the pyrimidines of the YA sites;
vi. conserved region YA site 8 comprises a 2′-fluoro modification at the pyrimidine of the YA site and YA sites 5 and 6; 5 and 7; 5 and 9; 6 and 7; 6 and 9; 5, 6, and 7; 5, 6, and 9; 6, 7, and 9; or 5, 6, 7, and 9 comprise 2′-OMe modifications, optionally at the pyrimidines of the YA sites;
vii. conserved region YA sites 1 and 8 comprise 2′-fluoro modifications and conserved region YA sites 5 and 6; 5 and 7; 5 and 9; 6 and 7; 6 and 9; 5, 6, and 7; 5, 6, and 9; 6, 7, and 9; or 5, 6, 7, and 9 comprise 2′-OMe modifications, optionally at the pyrimidines of the YA sites; or
viii. conserved region YA sites 1 and 8 comprise 2′-fluoro modifications at the pyrimidines of the YA sites and conserved region YA sites 5 and 6; 5 and 7; 5 and 9; 6 and 7; 6 and 9; 5, 6, and 7; 5, 6, and 9; 6, 7, and 9; or 5, 6, 7, and 9 comprise 2′-OMe modifications, optionally at the pyrimidines of the YA sites.

227. The gRNA of any one of claims 205-226, wherein conserved region YA sites 7 and 9 comprise YA modifications, which are optionally 2′-OMe modifications.

228. The gRNA of any one of claims 205-227, wherein conserved region YA sites 5, 6, 7, and 9 comprise YA modifications, which are optionally 2′-OMe modifications.

229. The gRNA of any one of claims 205-228, wherein conserved region YA site 8 comprises a 2′-fluoro modification.

230. The gRNA of any one of claims 205-229, wherein conserved region YA site 8 comprises a deoxyribonucleotide modification.

231. The gRNA of any one of claims 205-230, wherein conserved region YA site 8 is abolished by a base substitution, optionally wherein the base substitution eliminates the uracil of YA site 8, further optionally wherein the base substitution is a uracil to guanine substitution.

232. The gRNA of any one of claims 205-231, wherein conserved region YA site 1 comprises a 2′-fluoro modification.

233. The gRNA of any one of claims 205-232, wherein conserved region YA site 1 comprises a PS modification.

234. The gRNA of any one of claims 205-233, wherein 1, 2, 3, 4, 5, 6, or 7 of LS5, LS7, LS8, LS9, LS10, LS11, and LS12 comprise modifications, optionally wherein the modifications are 2′-fluoro and/or 2′-OMe modifications.

235. The gRNA of any one of claims 205-234, wherein modifications at LS5, LS7, LS9, and LS11, if present, comprise 2′-fluoro modifications, optionally wherein each of LS5, LS7, LS9, and LS11 comprise 2′-fluoro modifications.

236. The gRNA of any one of claims 205-235, wherein modifications at LS8, LS10, and LS12, if present, comprise 2′-OMe modifications, optionally wherein each of LS8, LS10, and LS12 comprise 2′-OMe modifications.

237. The gRNA of any one of claims 205-236, wherein 1, 2, 3, 4, 5, 6, 7, 8, 9, or 10 of N2, N3, N4, N5, N6, N7, N10, N11, N16, and N17 comprise modifications, which are optionally 2′-OMe modifications.

238. The gRNA of any one of claims 205-237, wherein H2-2 comprises a modification, optionally wherein H2 is otherwise unmodified.

239. The gRNA of any one of claims 205-238, wherein H2-2 comprises a 2′-OMe modification.

240. The gRNA of any one of claims 205-239, wherein US3, US9, and US12 comprise modifications, optionally wherein the US is otherwise unmodified.

241. The gRNA of any one of claims 205-240, wherein US3, US9, and US12 comprise 2′-OMe modifications.

242. The gRNA of any one of claims 205-241, wherein nucleotides 6-10 from the 5′ end of the 5′ terminus comprise a PS modification and nucleotides 8-11, 13, 14, 17, and 18 from the 5′ end of the 5′ terminus comprise a 2′-fluoro modification.

243. The gRNA of any one of claims 205-242, wherein each guide region YA site comprises a 2′-fluoro modification, optionally excepting nucleotides 15 and/or 16 from the 5′ end of the 5′ terminus.

244. The gRNA of any one of claims 205-243, wherein nucleotides 4, 8, and 11 from the 5′ end of the 5′ terminus comprise YA modifications, optionally wherein nucleotide 4 comprises a 2′-OMe modification and nucleotides 8 and 11 comprise a 2′-fluoro modification.

245. The gRNA of any one of claims 205-244, wherein 1, 2, 3, 4, 5, 6, 7, 8, 9, 10, 11, 12, 13, 14, 15, or more modified YA sites comprise a YA modification at the pyrimidine position of the YA site.

246. The gRNA of claim 245, wherein 1, 2, 3, 4, 5, 6, 7, 8, 9, or 10 modified conserved region YA sites comprise a YA modification at the pyrimidine position of the YA site.

247. The gRNA of any one of claims 205-246, wherein 1, 2, 3, 4, 5, 6, 7, 8, 9, 10, 11, 12, 13, 14, 15, or more modified YA sites comprise a YA modification at the adenine position of the YA site.

248. The gRNA of claim 247, wherein 1, 2, 3, 4, 5, 6, 7, 8, 9, or 10 modified conserved region YA sites comprise a YA site modification at the adenine position of the YA site.

249. The gRNA of any one of claims 205-248, comprising:
i. a modification of H1-1;
ii. a modification of H2-1; or
iii. modifications of H1-1 and H2-1.

250. The gRNA of claim 249, wherein H1-1 and/or H2-1 comprises a 2′-OMe modification.

251. The gRNA of claim 250, wherein H1-1 and/or H2-1 comprises a 2′-fluoro modification.

252. The gRNA of claim 251, wherein H1-1 and/or H2-1 comprises a PS modification.

253. The gRNA of any one of claims 205-252, comprising a modification at B3, optionally wherein B6 does not comprise a 2′-OMe modification or comprises a modification other than 2′-OMe.

254. The gRNA of any one of claims 205-253, comprising a modification at B4, optionally wherein B6 does not comprise a 2′-OMe modification or comprises a modification other than 2′-OMe.

255. The gRNA of any one of claims 205-254, comprising a modification at B5, optionally wherein B6 does not comprise a 2′-OMe modification or comprises a modification other than 2′-OMe.

256. The gRNA of any one of claims 205-255, comprising a modification at LS10, optionally wherein LS10 comprises a modification other than 2′-fluoro.

257. The gRNA of any one of claims 205-256, comprising a modification at N2.

258. The gRNA of any one of claims 205-257, comprising a modification at N3.

259. The gRNA of any one of claims 205-258, comprising a modification at N4.

260. The gRNA of any one of claims 205-259, comprising a modification at N5.

261. The gRNA of any one of claims 205-260, comprising a modification at N6.

262. The gRNA of any one of claims 205-261, comprising a modification at N7.

263. The gRNA of any one of claims 205-262, comprising a modification at N10.

264. The gRNA of any one of claims 205-263, comprising a modification at N11.

265. The gRNA of any one of claims 205-264, wherein:
i. nucleotide 8 from the 5′ end of the 5′ terminus does not comprise a 2′-fluoro modification;
ii. nucleotide 9 from the 5′ end of the 5′ terminus does not comprise a 2′-fluoro modification;
iii. nucleotide 10 from the 5′ end of the 5′ terminus does not comprise a 2′-fluoro modification;
iv. nucleotide 11 from the 5′ end of the 5′ terminus does not comprise a 2′-fluoro modification;
v. nucleotide 13 from the 5′ end of the 5′ terminus does not comprise a 2′-fluoro modification;
vi. nucleotide 14 from the 5′ end of the 5′ terminus does not comprise a 2′-fluoro modification;
vii. nucleotide 17 from the 5′ end of the 5′ terminus does not comprise a 2′-fluoro modification; and/or
viii. nucleotide 18 from the 5′ end of the 5′ terminus does not comprise a 2′-fluoro modification.

266. The gRNA of any one of claims 205-265, wherein:
i. nucleotide 6 from the 5′ end of the 5′ terminus does not comprise a 2′-fluoro modification;
ii. nucleotide 7 from the 5′ end of the 5′ terminus does not comprise a 2′-fluoro modification;
iii. nucleotide 8 from the 5′ end of the 5′ terminus does not comprise a 2′-fluoro modification;
iv. nucleotide 9 from the 5′ end of the 5′ terminus does not comprise a 2′-fluoro modification; and/or
v. nucleotide 10 from the 5′ end of the 5′ terminus does not comprise a 2′-fluoro modification.

267. The gRNA of any one of claims 205-266, wherein:
i. nucleotide 6 from the 5′ end of the 5′ terminus does not comprise a phosphorothioate linkage;
ii. nucleotide 7 from the 5′ end of the 5′ terminus does not comprise a phosphorothioate linkage;
iii. nucleotide 8 from the 5′ end of the 5′ terminus does not comprise a phosphorothioate linkage;
iv. nucleotide 9 from the 5′ end of the 5′ terminus does not comprise a phosphorothioate linkage; and/or
v. nucleotide 10 from the 5′ end of the 5′ terminus does not comprise a phosphorothioate linkage.

268. The gRNA of any one of claims 205-267, wherein:
i. nucleotide 7 from the 5′ end of the 5′ terminus does not comprise a 2′-OMe modification;
ii. nucleotide 8 from the 5′ end of the 5′ terminus does not comprise a 2′-OMe modification;
iii. nucleotide 9 from the 5′ end of the 5′ terminus does not comprise a 2′-OMe modification; and/or
iv. nucleotide 10 from the 5′ end of the 5′ terminus does not comprise a 2′-OMe modification.

269. The gRNA of any one of claims 205-268, wherein nucleotide 20 from the 5′ end of the 5′ terminus does not comprise a 2′-OMe modification.

270. The gRNA of any one of claims 205-269, wherein the guide RNA comprises a 2′-fluoro modification at any one or more of nucleotides 1-11 and 13-20 from the 5′ end of the 5′ terminus and nucleotide 12 from the 5′ end of the 5′ terminus does not comprise a 2′-fluoro modification.

271. The gRNA of any one of claims 205-270, wherein the guide RNA comprises a 2′-fluoro modification at any one or more of nucleotides 1-20 from the 5′ end of the 5′ terminus and:
i. nucleotide 11 from the 5′ end of the 5′ terminus does not comprise a 2′-fluoro modification;
ii. nucleotide 12 from the 5′ end of the 5′ terminus does not comprise a 2′-fluoro modification;
iii. nucleotide 13 from the 5′ end of the 5′ terminus does not comprise a 2′-fluoro modification;
iv. nucleotide 14 from the 5′ end of the 5′ terminus does not comprise a 2′-fluoro modification;
v. nucleotide 17 from the 5′ end of the 5′ terminus does not comprise a 2′-fluoro modification; and/or
vi. nucleotide 18 from the 5′ end of the 5′ terminus does not comprise a 2′-fluoro modification.

272. The gRNA of any one of claims 205-271, wherein:
i. B2 does not comprise a 2′-OMe modification;
ii. B3 does not comprise a 2′-OMe modification;
iii. B4 does not comprise a 2′-OMe modification; and/or
iv. B5 does not comprise a 2′-OMe modification.

273. The gRNA of any one of claims 205-272, wherein:
i. LS1 does not comprise a 2′-OMe modification;
ii. LS8 does not comprise a 2′-OMe modification; and/or
iii. LS10 does not comprise a 2′-OMe modification.

274. The gRNA of any one of claims 205-273, wherein:
i. N2 does not comprise a 2′-OMe modification;
ii. N3 does not comprise a 2′-OMe modification;
iii. N4 does not comprise a 2′-OMe modification;
iv. N5 does not comprise a 2′-OMe modification;
v. N6 does not comprise a 2′-OMe modification;
vi. N7 does not comprise a 2′-OMe modification;
vii. N10 does not comprise a 2′-OMe modification;
viii. N11 does not comprise a 2′-OMe modification;
ix. N16 does not comprise a 2′-OMe modification; and/or
x. N17 does not comprise a 2′-OMe modification.

275. The gRNA of any one of claims 205-274, wherein:
i. H1-2 does not comprise a phosphorothioate linkage;
ii. H1-3 does not comprise a phosphorothioate linkage;
iii. H1-4 does not comprise a phosphorothioate linkage;
iv. H1-5 does not comprise a phosphorothioate linkage;
v. H1-6 does not comprise a phosphorothioate linkage;
vi. H1-7 does not comprise a phosphorothioate linkage;
vii. H1-8 does not comprise a phosphorothioate linkage;
viii. H1-9 does not comprise a phosphorothioate linkage;
ix. H1-10 does not comprise a phosphorothioate linkage;
x. H2-1 does not comprise a phosphorothioate linkage;
xi. H2-2 does not comprise a phosphorothioate linkage;
xii. H2-3 does not comprise a phosphorothioate linkage;
xiii. H2-4 does not comprise a phosphorothioate linkage;
xiv. H2-5 does not comprise a phosphorothioate linkage;
xv. H2-6 does not comprise a phosphorothioate linkage;
xvi. H2-7 does not comprise a phosphorothioate linkage;
xvii. H2-8 does not comprise a phosphorothioate linkage;
xviii. H2-9 does not comprise a phosphorothioate linkage;
xix. H2-10 does not comprise a phosphorothioate linkage;
xx. H2-11 does not comprise a phosphorothioate linkage;
xxi. H2-12 does not comprise a phosphorothioate linkage;
xxii. H2-13 does not comprise a phosphorothioate linkage;
xxiii. H2-14 does not comprise a phosphorothioate linkage; and/or
xxiv. H2-15 does not comprise a phosphorothioate linkage.

276. A gRNA which is an sgRNA comprising modifications at:
i. nucleotides 6-10 from the 5′ end of the 5′ terminus, which are optionally PS modifications;
ii. nucleotides 8-11, 13, 14, 17, and 18 from the 5′ end of the 5′ terminus, which are optionally 2′-fluoro modifications; and
iii. H1-1 and H2-1, which are optionally 2′-OMe modifications, or conserved region YA site 1 or 8.

277. A gRNA which is an sgRNA comprising YA modifications at:
i. conserved region YA sites 1, 5, 6, 7, and 9, which are optionally 2′-OMe modifications; and
ii. conserved region YA site 8, which is optionally a 2′-fluoro modification.

278. A gRNA comprising YA modifications at four guide region YA sites, wherein at least one of the YA sites is at or after nucleotide 8 from the 5′ end of the 5′ terminus, and wherein:
i. the first YA site comprises a 2′-OMe modification;
ii. the second YA site comprises a 2′-fluoro modification;
iii. the third YA site comprises a 2′-fluoro or PS modification; and
iv. the fourth YA site comprises a PS modification,
optionally wherein the first, second, third, and fourth YA sites are arranged in the 5′ to 3′ direction.

279. The gRNA of claim 278, wherein the third YA site comprises a PS modification.

280. The gRNA of any one of claims 278-279, wherein the third YA site comprises a 2′-fluoro modification.

281. The gRNA of any one of claims 278-280, further comprising a fifth YA site comprising a PS modification, which is optionally 3′ of the fourth YA site.

282. The gRNA of any one of the claims 205-281, wherein conserved region YA sites 1, 5, 6, 7, and 9 comprise YA modifications, which are optionally 2′-OMe modifications; and conserved region YA site 8 comprises a modification, which is optionally a 2′-fluoro modification.

283. A gRNA which is an sgRNA comprising YA modifications at:
i. nucleotide 4 from the 5′ end of the 5′ terminus, wherein the YA modification is optionally a 2′-OMe modification;
ii. nucleotides 6-10 from the 5′ end of the 5′ terminus, which are optionally PS modifications;
iii. nucleotides 8-11, 13, 14, 17, and 18 from the 5′ end of the 5′ terminus, which are optionally 2′-fluoro modifications;
iv. LS5, LS7, LS9, and LS11, which are optionally 2′-fluoro modifications;
v. LS8, LS10, and LS12, which are optionally 2′-OMe modifications;
vi. N2, N3, N4, N5, N6, N7, N10, N11, N16, and N17, which are optionally 2′-OMe modifications; and
vii. N14, which is optionally a 2′-fluoro modification.

284. The gRNA of any one of claim 161-, wherein one or more of the following are true:
i. nucleotide 4 from the 5′ end of the 5′ terminus comprises a 2′-OMe modification;
ii. nucleotides 6-10 from the 5′ end of the 5′ terminus comprise PS modifications;
iii. nucleotides 8-11, 13, 14, 17, and 18 from the 5′ end of the 5′ terminus comprise 2′-fluoro modifications;
iv. LS5, LS7, LS9, and LS11 comprise 2′-fluoro modifications;
v. LS8, LS10, and LS12 comprise 2′-OMe modifications;
vi. N2, N3, N4, N5, N6, N7, N10, N11, N16, and N17 comprise 2′-OMe modifications; and
vii. N14 comprises a 2′-fluoro modification.

285. The gRNA of any one of claims 161-284, wherein at least one YA modification comprises a modification of the pyrimidine position of the YA site.

286. The gRNA of any one of claims 161-285, wherein at least one YA modification comprises a modification of the adenine position of the YA site.

287. The gRNA of any one of claims 161-286, wherein at least 2, 3, 4, 5, 6, 7, 8, 9, or 10 YA sites comprise YA modifications at the pyrimidines positions of the YA sites.

288. The gRNA of any one of claims 161-287, wherein at least 2, 3, 4, 5, 6, 7, 8, 9, or 10 YA sites comprise YA modifications at the adenine positions of the YA sites.

289. The gRNA of any one of claims 161-288, wherein at least one YA modification comprises a 2′-OMe modification.

290. The gRNA of any one of claims 161-289, wherein at least 2, 3, 4, 5, 6, 7, 8, 9, or 10 YA sites comprise a 2′-OMe modification.

291. The gRNA of any one of claims 161-290, wherein each modified conserved region YA site comprises a modification at the pyrimidine position of the YA site.

292. The gRNA of any one of claims 161-291, wherein each modified guide region YA site, or each modified conserved region and guide region YA site, comprises a modification at the pyrimidine position of the YA site.

293. The gRNA of any one of claims 161-292, wherein each modified conserved region YA site comprises a modification at the adenine position of the YA site.

294. The gRNA of any one of claims 161-293, wherein each modified guide region YA site, or each modified conserved region and guide region YA site, comprises a modification at the adenine position of the YA site.

295. The gRNA of any one of claims 161-294, which is an sgRNA comprising a modification at LS5.

296. The gRNA of any one of claims 161-295, which is an sgRNA comprising a modification at LS7.

297. The gRNA of any one of claims 161-296, which is an sgRNA comprising a modification at LS9, optionally wherein if LS9 is modified and LS5, LS7, and LS12 are not, then the modification of LS9 is other than 2′-fluoro.

298. The gRNA of any one of claims 161-297, which is an sgRNA comprising a modification at LS12, optionally wherein if LS12 is modified and LS9 is not, then the modification of LS12 is other than 2′-OMe.

299. The gRNA of any one of claims 161-298, which is an sgRNA comprising at least one YA modification that stabilizes a secondary structure, optionally wherein the secondary structure is the lower stem.

300. The gRNA of any one of claims 161-299, which is an sgRNA comprising at least one modification of LS8 and/or LS11, optionally wherein the modification of LS8 and/or LS11 stabilizes a secondary structure.

301. The gRNA of any one of claims 161-300, comprising a YA modification that stabilizes a secondary structure chosen from:
i. ENA;
ii. LNA; or
iii. a bicyclic ribose modification.

302. The gRNA of any one of claims 161-301, which is an sgRNA comprising a modification at N6.

303. The gRNA of any one of claims 161-302, which is an sgRNA comprising a modification at N14.

304. The gRNA of any one of claims 161-303, which is an sgRNA comprising a modification at N17, optionally wherein if N17 is modified and N6 and N14 are not, then the modification of N17 is other than 2′-fluoro and other than 2′-OMe.

305. The gRNA of any one of claims 161-304, wherein at least 1, 2, or 3 of nucleotides 1-3 from the 5′ end of the 5′ terminus comprise deoxyribonucleotides, optionally wherein nucleotides 1-3 from the 5′ end of the 5′ terminus comprise PS modifications.

306. The gRNA of any one of claims 161-305, wherein the gRNA is an sgRNA and at least 1, 2, or 3 of nucleotides 1-3 from the 3′ end of the 3′ terminus comprise deoxyribonucleotides, optionally wherein nucleotides 2-3 from the 3′ end of the 3′ terminus comprise PS modifications.

307. The gRNA of any one of claims 161-306, wherein the gRNA is an sgRNA and nucleotide 4 from the 3′ end of the 3′ terminus comprises a PS modification, optionally wherein nucleotide 4 from the 3′ end of the 3′ terminus comprises a 2′-OMe modification.

308. The gRNA of any one of claims 161-307, wherein the gRNA is an sgRNA and hairpin 2 comprises deoxyribonucleotides, optionally wherein all or all but 1, 2, 3, 4, 5, 6, 7, 8, 9, or 10 nucleotides of hairpin 1 and hairpin 2 are deoxyribonucleotides.

309. The gRNA of any one of claims 161-308, wherein the gRNA is an sgRNA and hairpin 1 and hairpin 2 comprise deoxyribonucleotides, optionally wherein all or all but 1, 2, 3, 4, 5, 6, 7, 8, 9, 10, 11, 12, or 13 nucleotides of hairpin 1 and hairpin 2 are deoxyribonucleotides.

310. The gRNA of any one of claims 161-309, wherein the gRNA is an sgRNA and all or all but 1, 2, 3, 4, 5, 6, 7, 8, 9, 10, 11, 12, or 13 nucleotides from the beginning of hairpin 1 to the 3′ end of the sgRNA are deoxyribonucleotides, optionally wherein nucleotides 1-3 from the 3′ end of the 3′ terminus are deoxyribonucleotides.

311. The gRNA of any one of claims 161-310, wherein the gRNA is an sgRNA and the upper stem comprises deoxyribonucleotides.

312. The gRNA of any one of claims 161-311, wherein the gRNA is an sgRNA and all or all but 1, 2, 3, 4, 5, 6, 7, 8, 9, or 10 nucleotides of the upper stem are deoxyribonucleotides.

313. The gRNA of any one of claims 161-312, wherein at least 1, 2, or 3 of nucleotides 1-3 from the 5′ end of the 5′ terminus comprise ENA, optionally wherein nucleotides 1-3 from the 5′ end of the 5′ terminus comprise PS modifications.

314. The gRNA of any one of claims 161-313, wherein the gRNA is an sgRNA and at least 1, 2, or 3 of nucleotides 2-4 from the 3′ end of the 3′ terminus comprise ENA, optionally wherein nucleotides 2-3 from the 3′ end of the 3′ terminus comprise PS modifications.

315. The gRNA of any one of claims 161-314, wherein at least 1, 2, or 3 of nucleotides 1-3 from the 5′ end of the 5′ terminus comprise UNA, optionally wherein nucleotides 1-3 from the 5′ end of the 5′ terminus comprise PS modifications.

316. The gRNA of any one of claims 161-315, wherein the gRNA is an sgRNA and at least 1, 2, or 3 of nucleotides 2-4 from the 3′ end of the 3′ terminus comprise UNA, optionally wherein nucleotides 2-3 from the 3′ end of the 3′ terminus comprise PS modifications.

317. The gRNA of any one of claims 161-316, wherein the gRNA is an sgRNA and nucleotide 4 from the 3′ end of the 3′ terminus comprises a PS modification, optionally wherein nucleotide 4 from the 3′ end of the 3′ terminus comprises a 2′-OMe modification.

318. The gRNA of any one claims 161-317, wherein the gRNA is an sgRNA that comprises a 3′ end modification.

319. The gRNA of any one of claims 161-318, which is an sgRNA comprising a 3′ end modification, wherein the 3′ end modification is a protective 3′ end modification.

320. The gRNA of any one claims 161-319, wherein the gRNA is an sgRNA that comprises a 3′ tail.

321. The gRNA of claim 320, wherein the 3′ tail comprises 1, 2, 3, 4, 5, 6, 7, 8, 9, or 10 nucleotides.

322. The gRNA of claim 320, wherein the 3′ tail comprises about 1-2, 1-3, 1-4, 1-5, 1-7, 1-10, at least 1-5, at least 1-3, at least 1-4, at least 1-5, at least 1-5, at least 1-7, or at least 1-10 nucleotides.

323. The gRNA of any one of claims 161-322, which is an sgRNA comprising a modification in the hairpin region.

324. The gRNA of any one of claims 161-323, which is an sgRNA comprising a 3′ end modification, and a modification in the hairpin region.

325. The gRNA of claim 323 or 324, wherein the modification in the hairpin region comprises a modified nucleotide selected from 2′-O-methyl (2′-O-Me) modified nucleotide, a 2′-fluoro (2′-F) modified nucleotide, or combinations thereof.

326. The gRNA of any one of claims 323-325, wherein the modification in the hairpin region comprises or further comprises a 2′-O-methyl (2′-O-Me) modified nucleotide.

327. The gRNA of any one of claims 323-326, wherein the modification in the hairpin region comprises or further comprises a 2′-fluoro (2′-F) modified nucleotide.

328. The gRNA of any one of claims 161-327, comprising 3′ and/or 5′ protective end modification(s).

329. The gRNA of claim 328, wherein the 3′ and/or 5′ end modification comprises a modified nucleotide selected from 2′-O-methyl (2′-O-Me) modified nucleotide, 2′-O-(2-methoxyethyl) (2′-O-moe) modified nucleotide, a 2′-fluoro (2′-F) modified nucleotide, a phosphorothioate (PS) linkage between nucleotides, an inverted abasic modified nucleotide, or combinations thereof.

330. The gRNA of claim 328 or 329, wherein the 3′ and/or 5′ end modification comprises or further comprises a 2′-O-methyl (2′-O-Me) modified nucleotide.

331. The gRNA of claim 328 or 329, wherein the 3′ and/or 5′ end modification comprises or further comprises a 2′-fluoro (2′-F) modified nucleotide.

332. The gRNA of claim 328 or 329, wherein the 3′ and/or 5′ end modification comprises or further comprises a phosphorothioate (PS) linkage between nucleotides.

333. The gRNA of claim 328 or 329, wherein the 3′ and/or 5′ end modification comprises or further comprises an inverted abasic modified nucleotide.

334. The gRNA of any one any one of claims 161-333, wherein the gRNA is an sgRNA and if the sgRNA comprises a 3′ end modification, the 3′ end modification comprises any one or more of the following:
i. a modification of any one or more of the last 7, 6, 5, 4, 3, 2, or 1 nucleotides;
ii. one modified nucleotide;
iii. two modified nucleotides;
iv. three modified nucleotides;
v. four modified nucleotides;
vi. five modified nucleotides;
vii. six modified nucleotides; and
viii. seven modified nucleotides.

335. The gRNA of claim 334, wherein the 3′ end modification comprises a modification of between 1 and 7, between 1 and 5, between 1 and 4, or between 2 and 4 nucleotides.

336. The gRNA of any one of claims 161-335, wherein the gRNA is an sgRNA comprising a 3′ end modification and the 3′ end modification comprises one or more of the following:
i. a phosphorothioate (PS) linkage between nucleotides;
ii. a 2′-O-Me modified nucleotide;
iii. a 2′-O-moe modified nucleotide;
iv. a 2′-F modified nucleotide;
v. an inverted abasic modified nucleotide
vi. ENA, UNA, and/or DNA; and
vii. or a combination thereof.

337. The gRNA of any one of claims 161-336, wherein the gRNA is an sgRNA comprising a 3′ tail, and the 3′ tail comprises any one or more of:
i. a phosphorothioate (PS) linkage between nucleotides;
ii. a 2′-O-Me modified nucleotide;
iii. a 2′-O-moe modified nucleotide;
iv. a 2′-F modified nucleotide;
v. an inverted abasic modified nucleotide
vi. ENA, UNA, and/or DNA; and
vii. or a combination thereof.

338. The gRNA of claim 336, wherein the 3′ end modification comprises:
i. 1, 2, 3, 4, 5, 6, or 7 PS linkages between nucleotides;
ii. about 1-3, 1-5, 1-6, or 1-7 PS linkages between nucleotides; or
iii. PS linkages between each nucleotide.

339. The gRNA of any one of claims claim 326-328, wherein the 3′ end modification further comprises at least one 2′-O-Me, 2′-O-moe, inverted abasic, or 2′-F modified nucleotide.

340. The gRNA of any one of claims 326-329, wherein the 3′ end modification comprises at least one PS linkage, and wherein:
i. there is one PS linkage, and the linkage is between the last and second to last nucleotide;
ii. there are two PS linkages between the last three nucleotides;
iii. there are PS linkages between any one or more of the last four nucleotides;
iv. there are PS linkages between any one or more of the last five nucleotides; or
v. there are PS linkages between any one or more of the last 2, 3, 4, 5, 6, 7, 8, 9, or 10 nucleotides.

341. The gRNA of any one of claims 336-340, wherein the 3′ end modification comprises:
i. a modification of one or more of the last 1-7 nucleotides, wherein the modification is a PS linkage, inverted abasic nucleotide, 2′-O-Me, 2′-O-moe, 2′-F, or combinations thereof;
ii. a modification to the last nucleotide with 2′-O-Me, 2′-O-moe, 2′-F, or combinations thereof, and an optional one or two PS linkages to the next nucleotide and/or the first nucleotide of the 3′ tail;
iii. a modification to the last and/or second to last nucleotide with 2′-O-Me, 2′-O-moe, 2′-F, or combinations thereof, and optionally one or more PS linkages;
iv. a modification to the last, second to last, and/or third to last nucleotides with 2′-O-Me, 2′-O-moe, 2′-F, or combinations thereof, and optionally one or more PS linkages;
v. a modification to the last, second to last, third to last, and/or fourth to last nucleotides with 2′-O-Me, 2′-O-moe, 2′-F, or combinations thereof, and optionally one or more PS linkages; or
vi. a modification to the last, second to last, third to last, fourth to last, and/or fifth to last nucleotides with 2′-O-Me, 2′-O-moe, 2′-F, or combinations thereof, and optionally one or more PS linkages.

342. The gRNA of any one of claims 161-341, wherein the gRNA is an sgRNA comprising a 3′ tail, wherein the 3′ tail comprises a modification of any one or more of the nucleotides present in the 3′ tail.

343. The gRNA of claim 342, wherein the 3′ tail is fully modified.

344. The gRNA of claim 342, wherein the 3′ tail comprises 1, 2, 3, 4, 5, 6, 7, 8, 9, 10, 1-2, 1-3, 1-4, 1-5, 1-6, 1-7, 1-8, 1-9, or 1-10 nucleotides, optionally where any one or more of these nucleotides are modified.

345. The gRNA of any one of claims 336-344, wherein the 3′ end modification comprises any one or more of the following:
i. the 3′ end modification as shown in any one of SEQ ID Nos: 401-532;
ii. (i) a 2′O-Me modified nucleotide at the last nucleotide of the conserved region of an sgRNA or short-sgRNA, (ii) three consecutive 2′O-moe modified nucleotides immediately 5′ to the 2′O-Me modified nucleotide, and (iii) three consecutive PS linkages between the last three nucleotides;
iii. (i) five consecutive 2′O-Me modified nucleotides from the 3′ terminus, and (ii) three PS linkages between the last three nucleotides;
iv. an inverted abasic modified nucleotide at the last nucleotide of the conserved region of an sgRNA or short-sgRNA;
v. (i) an inverted abasic modified nucleotide at the last nucleotide of the conserved region of an sgRNA or short-sgRNA, and (ii) three consecutive 2′O-Me modified nucleotides at the last three nucleotides of the conserved region of an sgRNA or short-sgRNA;
vi. (i) 15 consecutive 2′O-Me modified nucleotides from the 3′ terminus, (ii) five consecutive 2′-F modified nucleotides immediately 5′ to the 2′O-Me modified nucleotides, and (iii) three PS linkages between the last three nucleotides;
vii. (i) alternating 2′O-Me modified nucleotides and 2′-F modified nucleotides at the last 20 nucleotides of the conserved region of an sgRNA or short-sgRNA, and (ii) three PS linkages between the last three nucleotides;
viii. (i) two or three consecutive 2′O-Me modified nucleotides, and (ii) three PS linkages between the last three nucleotides;
ix. one PS linkage between the last and next to last nucleotides; and
x. 15 or 20 consecutive 2′O-Me modified nucleotides, and (ii) three PS linkages between the last three nucleotides.

346. The gRNA of any one of claims 161-345, comprising a 5′ end modification comprising any one or more of the following:
i. a modification of any one or more of nucleotides 1-7 of the guide region;
ii. one modified nucleotide;
iii. two modified nucleotides;
iv. three modified nucleotides;
v. four modified nucleotides;
vi. five modified nucleotides;
vii. six modified nucleotides; and
viii. seven modified nucleotides.

347. The gRNA of any one of claims 161-346, comprising a 5′ end modification, wherein the 5′ end modification is a protective 5′ end modification.

348. The gRNA of any one of claims 161-347, comprising a 5′ end modification, wherein the 5′ end modification comprises a modification of between 1 and 7, between 1 and 5, between 1 and 4, between 1 and 3, or between 1 and 2 nucleotides.

349. The gRNA of any one of claims 161-348, comprising a 5′ end modification wherein the 5′ end modification comprises any one or more of the following:
i. modifications of 1, 2, 3, 4, 5, 6, or 7 of the first 7 nucleotides;
ii. modifications of about 1-3, 1-4, 1-5, 1-6, or 1-7 of the first 7 nucleotides; and
iii. modifications at the first, second, third, fourth, fifth, sixth, and/or seventh nucleotide at the 5′ end, optionally wherein the modifications are consecutive.

350. The gRNA of any one of claims 161-349, comprising a 5′ end modification, wherein the 5′ end modification comprises one or more of:
i. a phosphorothioate (PS) linkage between nucleotides;
ii. a 2′-O-Me modified nucleotide;
iii. a 2′-O-moe modified nucleotide;
iv. a 2′-F modified nucleotide;
v. an inverted abasic modified nucleotide
vi. ENA, UNA, and/or DNA; and
vii. combinations thereof.

351. The gRNA any one of claims 161-350, comprising a 5′ end modification wherein the 5′ end modification comprises:
i. 1, 2, 3, 4, 5, 6, and/or 7 PS linkages between nucleotides; or
ii. about 1-2, 1-3, 1-4, 1-5, 1-6, or 1-7 PS linkages between nucleotides.

352. The gRNA of any one of claims 161-351, wherein the sgRNA comprises a 5′ end modification and the 5′ end modification comprises at least one 2′-O-Me, 2′-O-moe, inverted abasic, 2′-H, inosine, or 2′-F modified nucleotide.

353. The gRNA of claim 352, wherein the 5′ end modification comprises at least one PS linkage, and wherein:
i. there is one PS linkage, and the linkage is at nucleotide 1 of the guide region;
ii. there are two PS linkages, and the linkages are at nucleotides 1 and 2 of the guide region;
iii. there are PS linkages at any one or more of nucleotides 1, 2, and 3 of the guide region;
iv. there are PS linkages at any one or more of nucleotides 1, 2, 3, and 4 of the guide region;
v. there are PS linkages at any one or more of nucleotides 1, 2, 3, 4, and 5 of the guide region;
vi. there are PS linkages at any one or more of nucleotides 1, 2, 3, 4, 5, and 6 of the guide region; or
vii. there are PS linkages at any one or more of nucleotides 1, 2, 3, 4, 5, 6, and 7 of the guide region.

354. The gRNA of any one of claims 352-353, wherein the 5′ end modification comprises:
i. a modification of one or more of nucleotides 1-7 of the variable region, wherein the modification is a PS linkage, inverted abasic nucleotide, 2′-O-Me, 2′-O-moe, 2′-F, 2′-H, inosine, and/or combinations thereof;
ii. a modification to the first nucleotide of the guide region with 2′-O-Me, 2′-O-moe, 2′-F, 2′-H, inosine, or combinations thereof, and an optional PS linkage to the next nucleotide;
iii. a modification to the first and/or second nucleotide of the variable region with 2′-O-Me, 2′-O-moe, 2′-F, 2′-H, inosine, or combinations thereof, and optionally one or more PS linkages;
iv. a modification to the first, second, and/or third nucleotides of the variable region with 2′-O-Me, 2′-O-moe, 2′-F, 2′-H, inosine, or combinations thereof, and optionally one or more PS linkages;
v. a modification to the first, second, third, and/or fourth nucleotides of the variable region with 2′-O-Me, 2′-O-moe, 2′-F, 2′-H, inosine, or combinations thereof, and optionally one or more PS linkages; or
vi. a modification to the first, second, third, fourth, and/or fifth nucleotides of the variable region with 2′-O-Me, 2′-O-moe, 2′-F, 2′-H, inosine, or combinations thereof, and optionally one or more PS linkages.

355. The gRNA of any one of claims 161-354, comprising a 5′ end modification, wherein the 5′ end modification comprises any one or more of the following:
i. a 5′ end modification as shown in any one of SEQ ID Nos: 1-54, 401-532, 1001, 1007-1132, 1205-1212, 1322-1406, 1417-1501, 1511-1596, 3018-3059, 3063-3104, 3108-3149, 3153-3194, 3198-3239, 3243-3284, 3295-3341, 3343-3385, 3388-3430, or 3549-3552;
ii. 2′-OMe modified nucleotides at nucleotides 1, 2, and 3 of the guide region;
iii. 2′-OMe modified nucleotides at nucleotides 1, 2, and 3 of the guide region and PS linkages between nucleotides 1 and 2, 2 and 3, and 3 and 4 of the guide region;
iv. 2′-OMe modified nucleotides at nucleotides 1, 2, 3, 4, and 5 of the guide region;
v. 2′-OMe modified nucleotides at nucleotides 1, 2, 3, 4, and 5 of the guide region and PS linkages between nucleotides 1 and 2, 2 and 3, 3 and 4, 4 and 5, and 5 and 6 of the guide region;
vi. 2′O-moe modified nucleotides at nucleotides 1, 2, and 3 of the guide region;
vii. 2′O-moe modified nucleotides at nucleotides 1, 2, and 3 of the guide region and PS linkages between nucleotides 1 and 2, 2 and 3, and 3 and 4 of the guide region;
viii. an inverted abasic modified nucleotide at nucleotide 1 of the guide region;
ix. an inverted abasic modified nucleotide at nucleotide 1 of the guide region and 2′-OMe modified nucleotides at nucleotides 1, 2, and 3 of the guide region; and
x. an inverted abasic modified nucleotide at nucleotide 1 of the guide region, 2′-OMe modified nucleotides at nucleotides 1, 2, and 3 of the guide region, and PS linkages between nucleotides 1 and 2, 2 and 3, 3 and 4, 4 and 5, and 5 and 6 of the variable region.

356. The gRNA of any one of claims 161-355, wherein the gRNA is an sgRNA and the upper stem region comprises at least one modification.

357. The gRNA of claim 346, wherein the upper stem modification comprises any one or more of the following:
i. a modification to any one or more of US1-US12 in the upper stem region;
ii. a modification of at least 1, 2, 3, 4, 5, 6, 7, 8, 9, 10, 11, or all 12 nucleotides in the upper stem region; and
iii. a modification of about 1-2, 1-3, 1-4, 1-5, 1-6, 1-7, 1-8, 1-9, 1-10, or 1-12 nucleotides in the upper stem region.

358. The gRNA of any one of claims 356-357, wherein the upper stem modification comprises one or more of:
i. a 2′-O-Me modified nucleotide;
ii. a 2′-H modified nucleotide;
iii. a 2′-F modified nucleotide; and
iv. combinations thereof.

359. The gRNA of any one of claims 161-358, wherein the gRNA is an sgRNA comprising one or more modifications in the hairpin 1 region.

360. The gRNA of claim 359 wherein the sgRNA comprises a modification at H1-1.

361. The gRNA of any one of claims 161-360, wherein the gRNA is an sgRNA comprising one or more modifications in the hairpin 2 region.

362. The gRNA of claim 361, wherein the sgRNA comprises a modification at H2-1.

363. The gRNA of any one of claims 161-362, wherein the gRNA is an sgRNA comprising comprises modifications at H1-1 to H1-12.

364. The gRNA of any one of claims 161-363, wherein the gRNA is an sgRNA comprising comprises modifications at H2-1 to H2-15.

365. The gRNA of any one of claims 161-364, wherein the gRNA is an sgRNA comprising one or more modifications in each of the upper stem region, the hairpin 1 region, and the hairpin 2 region.

366. The gRNA of any one of claims 161-365, wherein the gRNA is an sgRNA comprising a modified nucleotide between hairpin 1 and hairpin 2 regions.

367. The gRNA of any one of claims 161-366, which is an sgRNA further comprising a lower stem region comprising a modification.

368. The gRNA of any one of claims 161-367, further comprising a 3′ end modification.

369. The gRNA of claim 368, wherein at least two of the last four nucleotides at the 3′ end of the 3′ terminus are modified.

370. The gRNA of claim 369, wherein at least two of the last four nucleotides at the 3′ end of the 3′ terminus are modified with 2′-O-Me, 2′-F, or 2′-O-moe.

371. The gRNA of any one of claims 368-370, further comprising phosphorothioate (PS) bonds between one or more of the last four nucleotides at the 3′ end of the 3′ terminus.

372. The gRNA of any one of claims 161-371, which is an sgRNA further comprising a bulge region comprising a modification.

373. The gRNA of any one of claims 161-372, which is an sgRNA further comprising a nexus region comprising a modification.

374. An sgRNA comprising any of SEQ ID Nos: 401-535, 601, 607-732, 801, 807-932, 1001, or 1007-1132, including the modifications of Table 1.

375. An sgRNA comprising nucleic acids having at least 99, 98, 97, 96, 95, 94, 93, 92, 91, 90, 85, 80, 75, or 70% identity to the nucleic acids of any one of SEQ ID Nos: 401-535, 601, 607-732, 801, 807-932, 1001, or 1007-1132, wherein the modification at each nucleotide of the sgRNA that corresponds to a nucleotide of the reference sequence identifier in Table 1, is identical to or equivalent to the modification shown in the reference sequence identifier in Table 1.

376. The gRNA of any one of claims 161-375, wherein the modification reduces gRNA degradation without significantly altering the ability of the guide to cleave a target nucleic acid.

377. The gRNA of any one of claims 161-376, comprising a YA modification wherein the modification comprises 2′-fluoro, 2′-H, 2′-O-Me, ENA, UNA, or PS.

378. The gRNA of any one of claims 161-377, comprising a YA modification wherein the modification alters the structure of the dinucleotide motif to reduce RNA endonuclease activity.

379. The gRNA of any one of claims 161-378, comprising a YA modification wherein the modification interferes with recognition or cleavage of a YA site by an RNase and/or stabilizes an RNA structure.

380. The gRNA of any one of claims 161-379, comprising a YA modification wherein the modification comprises one or more of:
i. a ribose modification selected from 2′-O-alkyl, 2′-F, 2′-moe, 2′-F arabinose, and 2′-H (deoxyribose);
ii. a bicyclic ribose analog, such as LNA, BNA, and ENA;
iii. an unlocked nucleic acid modification;
iv. a base modification, such as inosine, pseudouridine, and 5′-methylcytosine; and
v. an internucleoside linkage modification such as phosphorothioate.

381. The gRNA of any one of the preceding claims, wherein the gRNA comprises a guide region that comprises a modification at nucleotide 5, optionally wherein the guide region comprises 2′-OMe modifications at nucleotides 1-4, phosphorothioate modifications at nucleotides 1-3 and 6-10, and/or 2′-F modifications at nucleotides 8-11, 13, 14, 17, and 18.

382. The gRNA of any one of the preceding claims, wherein the gRNA comprises a guide region that comprises a modification at nucleotide 12, optionally wherein the guide region comprises 2′-OMe modifications at nucleotides 1-4, phosphorothioate modifications at nucleotides 1-3 and 6-10, and/or 2′-F modifications at nucleotides 8-11, 13, 14, 17, and 18.

383. The gRNA of any one of the preceding claims, wherein the gRNA comprises a guide region that comprises a 2′-OMe modification at nucleotide 5 and/or nucleotide 12, optionally wherein the guide region comprises 2′-OMe modifications at nucleotides 1-4, phosphorothioate modifications at nucleotides 1-3 and 6-10, and/or 2′-F modifications at nucleotides 8-11, 13, 14, 17, and 18.

384. The gRNA of any one of the preceding claims, wherein the gRNA comprises a guide region that comprises a 2′-F modification at nucleotide 5 and/or nucleotide 12, optionally wherein the guide region comprises 2′-OMe modifications at nucleotides 1-4, phosphorothioate modifications at nucleotides 1-3 and 6-10, and/or 2′-F modifications at nucleotides 8-11, 13, 14, 17, and 18.

385. The gRNA of any one of the preceding claims, wherein the gRNA comprises a guide region that comprises a 2′-H modification at nucleotide 5 and/or nucleotide 12, optionally wherein the guide region comprises 2′-OMe modifications at nucleotides 1-4, phosphorothioate modifications at nucleotides 1-3 and 6-10, and/or 2′-F modifications at nucleotides 8-11, 13, 14, 17, and 18.

386. The gRNA of any one of the preceding claims, wherein the gRNA comprises a guide region that comprises a phosphorothioate modification at nucleotide 5 and/or nucleotide 12, optionally wherein the guide region comprises 2′-OMe modifications at nucleotides 1-4, phosphorothioate modifications at nucleotides 1-3 and 6-10, and/or 2′-F modifications at nucleotides 8-11, 13, 14, 17, and 18.

387. The gRNA of any one of the preceding claims, wherein the gRNA comprises a guide region that comprises modifications at:
i. nucleotides 8-10;
ii. nucleotides 8 and 9;
iii. nucleotides 8 and 10; or
iv. nucleotides 9 and 10,
optionally wherein the guide region comprises 2′-OMe modifications at nucleotides 1-4, phosphorothioate modifications at nucleotides 1-3 and 6-7, and/or 2′-F modifications at nucleotides 11, 13, 14, 17, and 18.

388. The gRNA of any one of the preceding claims, wherein the gRNA comprises a guide region that comprises 2′-F modifications at:
i. nucleotides 8-10;
ii. nucleotides 8 and 9;
iii. nucleotides 8 and 10;
iv. nucleotides 9 and 10; or
v. nucleotide 8;
optionally wherein the guide region comprises 2′-OMe modifications at nucleotides 1-4, phosphorothioate modifications at nucleotides 1-3 and 6-7, and/or 2′-F modifications at nucleotides 11, 13, 14, 17, and 18.

389. The gRNA of any one of the preceding claims, wherein the gRNA comprises a guide region that comprises 2′-F modifications at:
i. nucleotides 8-10;
ii. nucleotides 8 and 9;
iii. nucleotides 8 and 10;
iv. nucleotides 9 and 10; or
v. nucleotide 8;
wherein nucleotides 8-10 do not comprise phosphorothioate modifications, and optionally wherein the guide region comprises 2′-OMe modifications at nucleotides 1-4, phosphorothioate modifications at nucleotides 1-3 and 6-7, and/or 2′-F modifications at nucleotides 11, 13, 14, 17, and 18.

390. The gRNA of any one of the preceding claims, wherein the gRNA comprises a guide region that comprises 2′-F modifications at nucleotides 8-10 and:
i. phosphorothioate modifications at 1, 2, or 3 of nucleotides 8-10;
ii. a phosphorothioate modification at nucleotide 8;
iii. a phosphorothioate modification at nucleotide 9;
iv. a phosphorothioate modification at nucleotide 10;
v. a phosphorothioate modification at nucleotides 8 and 9;
vi. a phosphorothioate modification at nucleotides 8 and 10;
vii. a phosphorothioate modification at nucleotides 9 and 10; or
viii. a phosphorothioate modification at nucleotides 8-10
optionally wherein the guide region comprises 2′-OMe modifications at nucleotides 1-4, phosphorothioate modifications at nucleotides 1-3 and 6-7, and/or 2′-F modifications at nucleotides 11, 13, 14, 17, and 18.

391. The gRNA of any one of the preceding claims, wherein the gRNA comprises a guide region that comprises:
i. a 2′-F or phosphorothioate modification at nucleotides 5 and 6;
ii. a 2′-F modification at nucleotides 5 and 6;
iii. a phosphorothioate modification at nucleotides 5 and 6;
iv. a 2′-F modification at nucleotide 5 and a phosphorothioate modification at nucleotide 6; or
v. a 2′-F modification at nucleotide 6 and a phosphorothioate modification at nucleotide 5;
optionally wherein the guide region comprises 2′-OMe modifications at nucleotides 1-4, phosphorothioate modifications at nucleotides 1-3 and 7-10, and/or 2′-F modifications at nucleotides 8-11, 13, 14, 17, and 18.

392. The gRNA of any one of the preceding claims, wherein the gRNA comprises a guide region that comprises 2′-F modifications at at least 1, 2, 3, 4, 5, or 6 of nucleotides 6-11, optionally wherein the guide region comprises 2′-OMe modifications at nucleotides 1-4, phosphorothioate modifications at nucleotides 1-3, and/or 2′-F modifications at nucleotides 13, 14, 17, and 18.

393. The gRNA of any one of the preceding claims, wherein the gRNA comprises a guide region that comprises 2′-F modifications at at least 1, 2, 3, 4, 5, 6, 7, 8, 9, or 10 of nucleotides 1-4 and 6-11, optionally wherein the guide region comprises phosphorothioate modifications at nucleotides 1-3 and/or 2′-F modifications at nucleotides 13, 14, 17, and 18.

394. The gRNA of any one of the preceding claims, wherein the gRNA comprises a guide region that comprises 2′-F modifications at nucleotides 6-11, optionally wherein the guide region comprises 2′-OMe modifications at nucleotides 1-4, phosphorothioate modifications at nucleotides 1-3, and/or 2′-F modifications at nucleotides 13, 14, 17, and 18.

395. The gRNA of any one of the preceding claims, wherein the gRNA comprises a guide region that comprises 2′-F modifications at nucleotides 1-4, optionally wherein the guide region comprises phosphorothioate modifications at nucleotides 1-3 and 6-10, and/or 2′-F modifications at nucleotides 6-11, 13, 14, 17, and 18.

396. The gRNA of any one of the preceding claims, wherein the gRNA comprises a guide region that comprises a 2′-F modification at nucleotide 9 and not a phosphorothioate modification at nucleotide 9, optionally wherein the guide region comprises 2′-OMe modifications at nucleotides 1-4, phosphorothioate modifications at nucleotides 1-3 and 6-8 and 10, and/or 2′-F modifications at nucleotides 8, 10, 11, 13, 14, 17, and 18.

397. The gRNA of any one of the preceding claims, wherein the gRNA comprises a guide region that does not comprise 2′-F modifications at at least 1, 2, 3, 4, 5, 6, 7, or 8 of nucleotides 8-11, 13, 14, 17, and 18, optionally wherein the guide region comprises 2′-OMe modifications at nucleotides 1-4 and/or phosphorothioate modifications at nucleotides 1-3 and 6-10.

398. The gRNA of any one of the preceding claims, wherein the gRNA comprises a guide region that does not comprise 2′-F modifications at nucleotides 8-11, 13, 14, 17, and 18, optionally wherein the guide region comprises 2′-OMe modifications at nucleotides 1-4 and/or phosphorothioate modifications at nucleotides 1-3 and 6-10.

399. The gRNA of any one of the preceding claims, wherein the gRNA comprises a guide region that comprises 2′-OMe modifications at at least 1, 2, 3, or 4 of nucleotides 9, 11, 13, and 14, optionally wherein the guide region comprises 2′-OMe modifications at nucleotides 1-4 and/or phosphorothioate modifications at nucleotides 1-3 and 6-10.

400. The gRNA of any one of the preceding claims, wherein the gRNA comprises a guide region that comprises 2′-OMe modifications at nucleotides 9, 11, 13, and 14, optionally wherein the guide region comprises 2′-OMe modifications at nucleotides 1-4 and/or phosphorothioate modifications at nucleotides 1-3 and 6-10.

401. The gRNA of any one of the preceding claims, wherein the gRNA comprises a guide region that comprises phosphorothioate modifications at one or both of nucleotides 8 and 10, optionally wherein the guide region comprises 2′-OMe modifications at nucleotides 1-4, phosphorothioate modifications at nucleotides 1-3 and 6-7, and/or 2′-F modifications at nucleotides 8-11, 13, 14, 17, and 18.

402. The gRNA of any one of the preceding claims, wherein the gRNA comprises a guide region that comprises modifications at at least 1, 2, 3, 4, 5, 6, 7, 8, 9, 10, 11, 12, 13, or all of the following nucleotides: 1, 2, 3, 4, 6, 7, 8, 9, 10, 11, 13, 14, 17, and 18, optionally wherein the modifications are 2′-OMe, 2′-fluoro, or phosphorothioate modifications.

403. The gRNA of any one of the the preceding claims, wherein the gRNA comprises a guide region that comprises modifications at nucleotides 1, 2, 3, 4, 6, 7, 8, 9, 10, 11, 13, 14, 17, and 18, optionally wherein the modifications are 2′-OMe, 2′-fluoro, or phosphorothioate modifications.

404. The gRNA of any one of the preceding claims, wherein 2′-OMe modifications are not present in the guide region at nucleotides 6-11 and 13-end.

405. The gRNA of any one of the preceding claims, wherein 2′-fluoro modifications are not present in the guide region at nucleotides 1-7, 15, 16, and 19-end.

406. The gRNA of any one of the preceding claims, wherein phosphorothioate modifications are not present in the guide region at nucleotides 4, 5, 11-14, 17, and 18.

407. The gRNA of any one of the preceding claims, wherein the guide region comprises an unmodified nucleotide 20.

408. The gRNA of any one of the preceding claims, wherein the guide region consists of 20 nucleotides.

409. The gRNA of any one of the preceding claims, wherein the guide region comprises a YA site at nucleotides 5-6 and a modification at nucleotide 5.

410. The gRNA of any one of the preceding claims, wherein the guide region comprises a YA site at nucleotides 12-13 and a modification at nucleotide 12.

411. The gRNA of any one of the preceding claims, wherein the guide region comprises a YA site at nucleotides 15-16 and a modification at nucleotide 15.

412. The gRNA of any one of the preceding claims, wherein the guide region comprises a YA site at nucleotides 16-17 and a modification at nucleotide 16.

413. The gRNA of any one of the preceding claims, wherein the guide region comprises a YA site at nucleotides 19-20 and a modification at nucleotide 19.

414. The gRNA of any one of the preceding claims, wherein the guide region does not comprise a YA site at nucleotides 5-6 and nucleotide 5 is unmodified.

415. The gRNA of any one of the preceding claims, wherein the guide region does not comprise a YA site at nucleotides 12-13 and nucleotide 12 is unmodified.

416. The gRNA of any one of the preceding claims, wherein the guide region does not comprise a YA site at nucleotides 15-16 and nucleotide 15 is unmodified.

417. The gRNA of any one of the preceding claims, wherein the guide region does not comprise a YA site at nucleotides 16-17 and nucleotide 16 is unmodified.

418. The gRNA of any one of the preceding claims, wherein the guide region does not comprise a YA site at nucleotides 19-20 and nucleotide 19 is unmodified.

419. The gRNA of any one of the preceding claims, wherein the gRNA comprises a guide region that comprises at least 1, 2, 3, 4, 5, 6, 7, 8, 9, 10, 11, 12, 13, or all of the following:
i. 2′-OMe and phosphorothioate modifications at nucleotide 1;
ii. 2′-OMe and phosphorothioate modifications at nucleotide 2;
iii. 2′-OMe and phosphorothioate modifications at nucleotide 3;
iv. a 2′-OMe modification at nucleotide 4;
v. a phosphorothioate modification at nucleotide 6;
vi. a phosphorothioate modification at nucleotide 7;
vii. 2′-fluoro and phosphorothioate modifications at nucleotide 8;
viii. 2′-fluoro and phosphorothioate modifications at nucleotide 9;
ix. 2′-fluoro and phosphorothioate modifications at nucleotide 10;
x. a 2′-fluoro modification at nucleotide 11;
xi. a 2′-fluoro modifications at nucleotide 13;
xii. a 2′-fluoro modifications at nucleotide 14;
xiii. a 2′-fluoro modifications at nucleotide 17; and
xiv. a 2′-fluoro modifications at nucleotide 18.

420. The gRNA of any one of the preceding claims, wherein the guide region comprises each of the modifications set forth in the preceding claim.

421. The gRNA of any one of the preceding claims, wherein the guide region comprises at least 1, 2, 3, or 4 of the following:
i. a 2′-OMe modification at nucleotide 5 if nucleotides 5 and 6 form a YA site;
ii. a 2′-OMe modification at nucleotide 12 if nucleotides 12 and 13 form a YA site;
iii. a phosphorothioate or 2′-H modification at nucleotide 15 if nucleotides 15 and 16 form a YA site;
iv. a phosphorothioate modification at nucleotide 16 if nucleotides 16 and 17 form a YA site; and
v. a phosphorothioate or 2′-fluoro modification at nucleotide 19 if nucleotides 19 and 20 form a YA site.

422. The gRNA of any one of the preceding claims, wherein the guide region comprises a YA site at nucleotides 5-6 and a a 2′-OMe modification at nucleotide 5.

423. The gRNA of any one of the preceding claims, wherein the guide region comprises a YA site at nucleotides 12-13 and a 2′-OMe modification at nucleotide 12.

424. The gRNA of any one of the preceding claims, wherein the guide region comprises a YA site at nucleotides 15-16 and a phosphorothioate modification at nucleotide 15.

425. The gRNA of any one of the preceding claims, wherein the guide region comprises a YA site at nucleotides 16-17 and a phosphorothioate modification at nucleotide 16.

426. The gRNA of any one of the preceding claims, wherein the guide region comprises a YA site at nucleotides 19-20 and a phosphorothioate modification at nucleotide 19.

427. The gRNA of any one of the preceding claims, wherein the guide region comprises a 2′-fluoro modification at nucleotide 19.

428. The gRNA of any one of the preceding claims, wherein the guide region comprises an unmodified nucleotide 15 or only a phosphorothioate modification at nucleotide 15.

429. The gRNA of any one of the preceding claims, wherein the guide region comprises an unmodified nucleotide 16 or only a phosphorothioate modification at nucleotide 16.

430. The gRNA of any one of the preceding claims, wherein the gRNA is an sgRNA comprising a conserved portion of an sgRNA comprising a hairpin region, wherein the hairpin region lacks at least 5-10 nucleotides.

431. The gRNA of claim 430, wherein the at least 5-10 lacking nucleotides are consecutive.

432. The gRNA of claim 430 or 431, wherein the at least 5-10 lacking nucleotides:
i. are within hairpin 1;
ii. are within hairpin 1 and the “N” between hairpin 1 and hairpin 2;
iii. are within hairpin 1 and the two nucleotides immediately 3′ of hairpin 1;
iv. include at least a portion of hairpin 1;
v. are within hairpin 2;
vi. include at least a portion of hairpin 2;
vii. are within hairpin 1 and hairpin 2;
viii. include at least a portion of hairpin 1 and include the “N” between hairpin 1 and hairpin 2;
ix. include at least a portion of hairpin 2 and include the “N” between hairpin 1 and hairpin 2;
x. include at least a portion of hairpin 1, include the “N” between hairpin 1 and hairpin 2, and include at least a portion of hairpin 2;
xi. are within hairpin 1 or hairpin 2, optionally including the “N” between hairpin 1 and hairpin 2;
xii. are consecutive;
xiii. are consecutive and include the “N” between hairpin 1 and hairpin 2;
xiv. are consecutive and span at least a portion of hairpin 1 and a portion of hairpin 2;
xv. are consecutive and span at least a portion of hairpin 1 and the “N” between hairpin 1 and hairpin 2; or
xvi. are consecutive and span at least a portion of hairpin 1 and two nucleotides immediately 3′ of hairpin 1.

433. The gRNA of any one of claims 430-432, wherein the at least 5-10 nucleotides comprise nucleotides 54-61 of SEQ ID NO:400, nucleotides 53-60 of SEQ ID NO:400; or nucleotides 54-58 of SEQ ID NO:400, optionally wherein the sgRNA comprises modifications at least H1-1 to H1-5 and H2-1 to H2-12.

434. The gRNA of any one of claims 430-433, wherein the at least 5-10 nucleotides:
i. consist of 5-10 nucleotides;
ii. consist of 6-10 nucleotides;
iii. consist of 5 nucleotides;
iv. consist of 6 nucleotides;
v. consist of 7 nucleotides;
vi. consist of 8 nucleotides;
vii. consist of 9 nucleotides;
viii. consist of 10 nucleotides;
ix. consist of 5-10 consecutive nucleotides;
x. consist of 6-10 consecutive nucleotides;
xi. consist of 5 consecutive nucleotides;
xii. consist of 6 consecutive nucleotides;
xiii. consist of 7 consecutive nucleotides;
xiv. consist of 8 consecutive nucleotides;
xv. consist of 9 consecutive nucleotides; or
xvi. consist of 10 consecutive nucleotides.

435. The gRNA of claim 434, wherein the at least 5-10 nucleotides comprise nucleotides 54-61 of SEQ ID NO:400, nucleotides 53-60 of SEQ ID NO:400; or nucleotides 54-58 of SEQ ID NO:400, optionally wherein the sgRNA comprises modifications at least H1-1 to H1-5 and H2-1 to H2-12.

436. The gRNA of any one of claims 430-435, wherein the at least 5-10 nucleotides:
i. comprise nucleotides 54-61 of SEQ ID NO:400;
ii. comprise nucleotides 53-60 of SEQ ID NO:400;
iii. comprise nucleotides 54-58 of SEQ ID NO:400.
iv. consist of nucleotides 54-61 of SEQ ID NO:400;
v. consist of nucleotides 53-60 of SEQ ID NO:400; or
vi. consist of nucleotides 54-58 of SEQ ID NO:400.

437. The gRNA of any one of the preceding claims, wherein the gRNA comprises modifications and/or unmodified nucleotides at at least 15 of nucleotides 1-20 from the 5′ end of the 5′ terminus that match the modification pattern at nucleotides 1-20 of any one of the gRNAs of SEQ ID NOs: 1-54, 201-254, 301-354, 401-535, 601, 607-732, 801, 807-932, 1001, 1007-1132, 1205-1212, 1322-1406, 1417-1501, 1511-1596, 3018-3059, 3063-3104, 3108-3149, 3153-3194, 3198-3239, 3243-3284, 3295-3341, 3343-3385, or 3388-3430.

438. The gRNA of any one of the preceding claims, wherein the gRNA comprises modifications and/or unmodified nucleotides at at least 16 of nucleotides 1-20 from the 5′ end of the 5′ terminus that match the modification pattern at nucleotides 1-20 of any one of the gRNAs of SEQ ID NOs: 1-54, 201-254, 301-354, 401-535, 601, 607-732, 801, 807-932, 1001, 1007-1132, 1205-1212, 1322-1406, 1417-1501, 1511-1596, 3018-3059, 3063-3104, 3108-3149, 3153-3194, 3198-3239, 3243-3284, 3295-3341, 3343-3385, or 3388-3430.

439. The gRNA of any one of the preceding claims, wherein the gRNA comprises modifications and/or unmodified nucleotides at at least 17 of nucleotides 1-20 from the 5′ end of the 5′ terminus that match the modification pattern at nucleotides 1-20 of a gRNA, wherein the gRNA is any one of SEQ ID NOs: 1-54, 201-254, 301-354, 401-535, 601, 607-732, 801, 807-932, 1001, 1007-1132, 1205-1212, 1322-1406, 1417-1501, 1511-1596, 3018-3059, 3063-3104, 3108-3149, 3153-3194, 3198-3239, 3243-3284, 3295-3341, 3343-3385, or 3388-3430.

440. The gRNA of any one of the preceding claims, wherein the gRNA comprises modifications and/or unmodified nucleotides at at least 18 of nucleotides 1-20 from the 5′ end of the 5′ terminus that match the modification pattern at nucleotides 1-20 of any one of the gRNAs of SEQ ID NOs: 1-54, 201-254, 301-354, 401-535, 601, 607-732, 801, 807-932, 1001, 1007-1132, 1205-1212, 1322-1406, 1417-1501, 1511-1596, 3018-3059, 3063-3104, 3108-3149, 3153-3194, 3198-3239, 3243-3284, 3295-3341, 3343-3385, or 3388-3430.

441. The gRNA of any one of the preceding claims, wherein the gRNA comprises modifications and/or unmodified nucleotides at at least 19 of nucleotides 1-20 from the 5′ end of the 5′ terminus that match the modification pattern at nucleotides 1-20 of any one of the gRNAs of SEQ ID NOs: 1-54, 201-254, 301-354, 401-535, 601, 607-732, 801, 807-932, 1001, 1007-1132, 1205-1212, 1322-1406, 1417-1501, 1511-1596, 3018-3059, 3063-3104, 3108-3149, 3153-3194, 3198-3239, 3243-3284, 3295-3341, 3343-3385, or 3388-3430.

442. The gRNA of any one of the preceding claims, wherein the gRNA comprises modifications and/or unmodified nucleotides at nucleotides 1-20 from the 5′ end of the 5′ terminus that match the modification pattern at nucleotides 1-20 of any one of the gRNAs of SEQ ID NOs: 1-54, 201-254, 301-354, 401-535, 601, 607-732, 801, 807-932, 1001, 1007-1132, 1205-1212, 1322-1406, 1417-1501, 1511-1596, 3018-3059, 3063-3104, 3108-3149, 3153-3194, 3198-3239, 3243-3284, 3295-3341, 3343-3385, or 3388-3430.

443. The gRNA of any one of the preceding claims, wherein the gRNA comprises a modification pattern that matches at least 75% of the modification pattern of any one of the gRNAs of SEQ ID NOs: 1-54, 201-254, 301-354, 401-535, 601, 607-732, 801, 807-932, 1001, 1007-1132, 1205-1212, 1322-1406, 1417-1501, 1511-1596, 3018-3059, 3063-3104, 3108-3149, 3153-3194, 3198-3239, 3243-3284, 3295-3341, 3343-3385, or 3388-3430.

444. The gRNA of any one of the preceding claims, wherein the gRNA comprises the modification pattern of any one of the gRNAs in Table 1, wherein the modification pattern is the same as any one of the gRNAs of SEQ ID NOs: 1-54, 201-254, 301-354, 401-535, 601, 607-732, 801, 807-932, 1001, 1007-1132, 1205-1212, 1322-1406, 1417-1501, 1511-1596, 3018-3059, 3063-3104, 3108-3149, 3153-3194, 3198-3239, 3243-3284, 3295-3341, 3343-3385, or 3388-3430.

445. The gRNA of any one of claims 437-444, further comprising a sequence having at least 75% identity to the sequence of nucleotides 21-end of the gRNA.

446. The gRNA of any one of claims 437-444, further comprising a sequence having at least 80% identity to the sequence of nucleotides 21-end of the gRNA.

447. The gRNA of any one of claims 437-444, further comprising a sequence having at least 85% identity to the sequence of nucleotides 21-end of the gRNA.

448. The gRNA of any one of claims 437-444, further comprising a sequence having at least 90% identity to the sequence of nucleotides 21-end of the gRNA.

449. The gRNA of any one of claims 437-444, further comprising a sequence having at least 95% identity to the sequence of nucleotides 21-end of the gRNA.

450. The gRNA of any one of claims 437-444, further comprising a sequence having at least 98% identity to the sequence of nucleotides 21-end of the gRNA.

451. The gRNA of any one of claims 437-444, further comprising a sequence having 100% identity to the sequence of nucleotides 21-end of the gRNA.

452. An LNP composition comprising a gRNA of any one of the preceding claims.

453. A composition comprising a gRNA of any one of claims 1-451 associated with a lipid nanoparticle (LNP).

454. A composition comprising the gRNA of any one of claims 1-451, or the composition of any one of claims 452-453, further comprising a nuclease or an mRNA which encodes the nuclease.

455. The composition of claim 454, wherein the nuclease is a Cas protein.

456. The composition of claim 455, wherein the Cas protein is a Cas9.

457. The composition of claim 456, wherein the Cas9 is an S. pyogenes Cas9 or an S. aureus Cas9.

458. The composition of any one of claims 453-457, wherein the nuclease is a nickase or a dCas.

459. The composition of any one of claims 453-458, wherein the nuclease is modified.

460. The composition of claim 459 wherein the modified nuclease comprises a nuclear localization signal (NLS).

461. The composition of any one of claims 452-460, comprising an mRNA which encodes the nuclease.

462. The composition of claim 461, wherein the mRNA comprises the sequence of any one of SEQ ID NOs: 3499-3527 or 3529-3546.

463. A pharmaceutical formulation comprising the gRNA of any one of claims 1-451 or the composition of any one of claims 452-462 and a pharmaceutically acceptable carrier.

464. A method of modifying a target DNA comprising, delivering a Cas protein or a nucleic acid encoding a Cas protein, and any one or more of the following to a cell:
i. the gRNA of any one of claims 1-451;
ii. the composition of any one of claims 452-462; and
iii. the pharmaceutical formulation of claim 463.

465. The method of claim 464, wherein the method results in an insertion or deletion in a gene.

466. The method of claim 464 or claim 465, further comprising delivering to the cell a template, wherein at least a part of the template incorporates into a target DNA at or near a double strand break site induced by the Cas protein.

467. The gRNA of any one of claims 1-451, the composition of claims 452-462, or the pharmaceutical formulation of claim 463 for use in preparing a medicament for treating a disease or disorder.

468. Use of the gRNA of any one of claims 1-451, the composition of claims 452-462, or the pharmaceutical formulation of claim 463 in the manufacture of a medicament for treating a disease or disorder.
